(19) United States
(12) Patent Application Publication
(10) Pub. No.: US 2011/0172107 A1
(43) Pub. Date: Jul. 14, 2011

(54) ASSAY FOR IDENTIFYING AGENTS THAT MODULATE EPIGENETIC SILENCING, AND AGENTS IDENTIFIED THEREBY

(75) Inventors: Richard A. Katz, Elkins Park, PA (US); Anna Marie Skalka, Princeton, NJ (US)

(73) Assignee: FOX CHASE CANCER CENTER, Jenkintown, PA (US)

(21) Appl. No.: 12/736,702

(22) PCT Filed: Apr. 30, 2009
(86) PCT No.: PCT/US09/02677

§ 371 Date: Feb. 22, 2011

Related U.S. Application Data
(60) Provisional application No. 61/125,932, filed on Apr. 30, 2008.

(51) Int. Cl. C12Q 1/68; C40B 30/00; C12N 5/071; C12N 9/78; C07K 14/47; C12N 9/10; C12N 9/00; C12N 9/02

(52) U.S. Cl. 506/7; 435/6.1; 435/366; 435/227; 530/350; 435/193; 435/183; 435/189

(57) ABSTRACT

A high throughput RNAi-based assay for identify factors involved in maintaining epigenetic silencing is disclosed. The assay measures reactivation of a silent reporter gene in cells, resulting from RNAi-based knockdown in target mRNA. RNAi-based screening of these silent reporter cells has identified known enzymes that place or remove epigenetic marks on histones, as well as non-enzymatic proteins that function in silencing or in transfer of marks during S-phase. In addition, the screen has been used to identify a number of novel gene products involved in epigenetic silencing, which are also disclosed.

### REFERENCE TO SEQUENCE LISTING

[0001] The Sequence Listing submitted on compact disk is hereby incorporated by reference. The file on the disk is named 046598-0005-WO-00.txt. The file is 6,591 kb and the date of creation is Apr. 30, 2009.

### BACKGROUND OF THE INVENTION

[0002] Each cell type in a multi-cellular organism may express only a characteristic subset of genes, yet largely retain the complete DNA blueprint. This programmed use of the genetic code is mediated by events that are defined as epigenetic: heritable changes in gene expression without changes in the nucleotide sequence. Epigenetic programming participates in the shaping of cellular identity by mediating heritable shutoff, or expression, of specific gene sets. Epigenetic processes thereby account for much of the selectivity and plasticity with respect to execution of gene expression. Epigenetic controls play a role in a variety of biological phenomena including cell differentiation, gene imprinting, X-chromosome inactivation and silencing of foreign DNA.

[0003] Rather than serving simply an organizational role for DNA packing, the histone components of nucleosomes play important roles in epigenetic control of gene expression. Epigenetic regulators have now been implicated in a variety of normal and disease processes including stem cell identity and cancer, respectively. While the molecular nature of genetic inheritance has been appreciated for the last half century, it has become obvious that epigenetic inheritance is more difficult to describe with simple paradigms.

[0004] Several basic features of epigenetic control are firmly established. Epigenetic regulation can be mediate by placement or removal of small chemical marks on chromatin (DNA and histones) and such modifications provide the “heritable” instructions for gene expression or gene silencing. Some of these marks had been well studied for decades, but their associations with gene function were simply correlative. Several breakthrough findings over the past decade launched the field as it is known it today. The first finding was that a histone modifying enzyme could control gene expression. It had been well established that transcribed genes were enriched for acetylated histones, but the identification of a histone acetyltransferase (HAT) as a transcriptional activator was the key finding that stimulated the current excitement surrounding epigenetic controls. It is now appreciated that histone tail acetylation provides binding sites for positive acting factors and that histone deacetylases (HDACs) remove acetyl groups and thereby antagonize the activity of HATs. These modifications provided a paradigm, leading to the “histone code” hypothesis, whereby a translatable set of histone modifications can mediate epigenetic processes. Similarly, DNA methylation had been associated with transcriptional repression, yet a causal relationship had not been established. The identification of methyl binding domain proteins (MBD) suggested one means by which repressive complexes could be recruited to methylated DNA. Evidence for a causal role for DNA methylation in epigenetic silencing is now generally accepted, but is still open to experimental investigation.

[0005] The current view of the histone code hypothesis is that enzymes can place or remove numerous epigenetic marks on histones, primarily on the N-terminal tails, and that these modifications are read in a specific manner to control gene expression. The numerous enzymes that place marks (e.g. acetylation or methylation on lysines residues) are described as “writers” of the histone code. The activities of these enzymes are antagonized by “erasers,” enzymes that remove these marks. “Readers” and “erasers” recognize the epigenetic marks and implement gene activation or repression. The readers typically contain modular domains that recognize specific histone modifications. Similarly, DNA methylation marks are recognized by proteins containing modular methyl binding domains (MBDs). Lastly, “chromatin remodeling complexes” also play critical roles in epigenetic control, as they can mediate accessibility to chromatin of both positive and negative epigenetic regulators and thus are viewed as participants in epigenetic regulation.

[0006] A key aspect of epigenetic regulation in development is the temporal and positional placement of epigenetic marks on histones and DNA. That is, the enzymes responsible for epigenetic marking activities must be targeted to specific genes at the appropriate time and be sustained through cell division. As such, the epigenetic marking activities can be generally classified as: initiation (de novo placement of marks) or maintenance during chromatin replication and cell division.

[0007] There is also a coordination between placement of epigenetic marks on DNA and histones. For example, DNA methylation and histone H3 lysine 9 (H3K9) methylation are generally regarded as marks associated with repressive heterochromatin. A seminal finding was that histone methylation can direct DNA methylation, a facet of what has been described as a “cooperative and self-reinforcing organization of the chromatin and DNA modifying machinery.”

[0008] As epigenetic instructions are by definition heritable, there is significant interest in the mechanisms by which histone code modifications and DNA methylation patterns are “inherited” through S-phase and mitosis. In the case of DNA methylation, it is understood that the hemi-methylated DNA produced during DNA replication provides a substrate for continued placement of methylation marks. In the case of histone marks, it is unclear as to whether this is accomplished by mechanisms whereby existing marks guide the placement of new marks during S-phase, or if the continued presence (or rebinding) of factors is required. It is likely that both enzymatic markings, as well as factor positioning, mediate “inheritance” of epigenetic marks during S-phase and mitosis. It has been noted that there is no direct proof for transfer of histone modifications to new chromatin during S-phase and an alternative view is that at least some types of epigenetic “inheritance” can be explained by classic models for transcriptional repressor binding.

[0009] Although many of the above concepts are well-supported, it has become apparent that the biochemical marks on chromatin may signify more complex and dynamic processes then had been previously thought. For example, H3K9 methylation was believed to be an exclusive mark for repressive heterochromatin, providing a recognition mark for heterochromatin protein 1 (HP1). More recent studies have indicated that this mark is also found in the body of active genes, perhaps signifying “transcriptional memory” or a mechanism to prevent inappropriate transcriptional initiation in the body of an active gene. It has also become appreciated that certain types of heterochromatin are transcribed, leading to RNAi-directed chromatin silencing of these transcribed regions. This counterintuitive mechanism highlights the potential complexities of epigenetic silencing systems. Also, numerous studies have indicated that histone modifications can be highly context-dependent and thus are not readily translatable as a simple code. Such intricacies can be explained by multivalent interactions on single histone tails. So-called “bivalent genes” have revealed further complexities. These genes contain both activating and repressive histone modifications; such relationships may signify genes that are poised for activation.

[0010] Thus, there is a need in the art to discover and characterize new epigenetic markers and regulators in cells, preferably through the use of a robust model system that is reproducible and amenable to use in a high throughput manner. The present invention satisfies that need.

### SUMMARY OF THE INVENTION

[0011] One aspect of the invention features a method of identifying gene products that are involved in epigenetic silencing, comprising: (1) providing a cell line comprising a genome into which is integrated an epigenetically silent reporter gene; (2) providing a mRNA inhibitor capable of inhibiting expression of a target mRNA, the product of which is suspected of being involved in the epigenetic silencing; (3) introducing the mRNA inhibitor into the cell line, thereby inhibiting expression of the target RNA; and (4) detecting an increase in expression of the reporter gene, the increase in expression being indicative that the product of expression of the target mRNA is involved in the epigenetic silencing.

[0012] The cell line can be of human origin or it can originate from another species. In one embodiment, the cell line is a HeLa cell line. In one embodiment, the silent reporter gene encodes a green fluorescent protein. The silent reporter gene can be disposed within a retroviral vector for introduction into the cell line and stable integration. The silent reporter gene can be operably linked to a promoter selected from a viral LTR promoter, a hCMV promoter, a EF1α promoter and a RNA Pol II promoter.

[0013] The mRNA inhibitor is an RNAi molecule such as an antisense molecule, an siRNA, a miRNA or a ribozyme. In certain embodiments, the target mRNA comprises one or more of a mRNA encoding HDAC1, daxx or HP1γ. In other embodiments, the target mRNA comprises one or more of a mRNA encoding the gene products of Tables 1 and 2. Inhibition (“knockdown” or “knockout” of a target mRNA), in certain embodiments, is accomplished using one or more mRNA inhibitors targeting the same target mRNA.

[0014] The aforementioned method can be adapted to comprise a high-throughput screening system, comprising a plurality of assay chambers in which each assay chamber comprises cells of the cell line into which different mRNA inhibitors are introduced.

[0015] Another aspect of the invention features a kit for practicing the above-recited methods. The kit may comprise a container and instructions for practicing the method, and further may comprise one or more of (1) a cell line comprising a genome into which is integrated an epigenetically silent reporter gene; and (2) a mRNA inhibitor. The kit can be adapted for practicing the methods in plurality; for example, it may comprise a plurality of assay containers and a plurality of mRNA inhibitors, and/or it may comprise a multi-well plate, wherein the reporter gene encodes a gene product that is directly or indirectly fluorescently detected.

[0016] Another aspect of the invention features a gene product that functions in maintaining epigenetic silencing, selected from HDAC1, Daxx, HP1γ, MBD1, MBD2, MBD3, SETDB1 (also known as ESET or KMT1E), DNMT3A, RING1, PHC2 (also known as HPH2), CHAF1A (also known CAF-1 p150), TRIM24 (also known as TIF1alpha), TRIM33 (also known as TIF1gamma), JMJD2A (also known as KDM4A), SUV420H2 (also known as KMT5C), RAD21, FBXL11 (also known as JHDM1a and KDM2A), PBRM1 (also known as BAF180) and ZMYND8. In one embodiment, the gene product is selected from MBD1, MBD2, MBD3, SETDB1 (also known as ESET or KMT1E) and DNMT3A. Alternatively, the gene product is selected from RING1, PHC2 (also known as HPH2) and CHAF1A (also known CAF-1 p150).

[0017] Specifically, the gene product is selected from TRIM24 (also known as TIF1alpha), TRIM33 (also known as TIF1gamma), JMJD2A (also known as KDM4A) and SUV420H2 (also known as KMT5C). Or, specifically, the gene product is selected from RAD21 and FBXL11 (also known as JHDM1a and KDM2A). Or, specifically, the gene product is selected from PBRM1 (also known as BAF180) and ZMYND8.

[0018] Another aspect of the invention features a method of relieving epigenetic silencing in a cell, comprising inhibiting production or expression of one or more mRNA molecule in the cell, selected from mRNA encoding HDAC1, Daxx, HP1γ, MBD1, MBD2, MBD3, SETDB1 (also known as ESET or KMT1E), DNMT3A, RING1, PHC2 (also known as HPH2), CHAF1A (also known CAF-1 p150), TRIM24 (also known as TIF1alpha), TRIM33 (also known as TIF1gamma), JMJD2A (also known as KDM4A), SUV420H2 (also known as KMT5C), RAD21, FBXL11 (also known as JHDM1a and KDM2A), PBRM1 (also known as BAF180) and ZMYND8, the inhibition resulting in relief of epigenetic silencing in the cell.

[0019] Other features and advantages of the present invention will be understood by reference to the detailed description and examples that follow.

### BRIEF DESCRIPTION OF THE DRAWINGS

[0020] FIG. 1 depicts the results of an example experiment demonstrating that the knockdown of HDAC1 or Daxx results in reactivation of the silent GFP reporter. (A) HeLa TI-C cells (Katz et al., 2007, J. Virol. 81:2592-2604) were transfected with the indicated siRNA SMARTpools (100 nM) (Dharmacon) and incubated for 96 hours. GFP expression was analyzed by FACS. NT, not transfected. (B) Histograms of GFP intensities (x axis) from the experiment shown in panel A. Percentages of GFP-positive cells are indicated by the numerical values. Autoscaling was used to portray the distribution of GFP intensities.

[0021] FIG. 2 depicts the results of an example experiment demonstrating the determination of specificity of siRNA knockdown. (A) qRT-PCR analysis of target mRNAs. For each target mRNA measurement, the values were normalized to a control which was treated with transfection reagent only (DharmaFECT 1 [DF1]). For HDAC1 and Daxx siRNA treatments, the levels of HDAC1, HDAC2, HDAC3, HDAC4, and Daxx mRNAs were measured. For HDAC2, HDAC3, and HDAC4 siRNAs, only the cognate target mRNA levels were measured (*). (B) Assessment of knockdown by Western blotting. TI-C cells were treated with 100 nM of siRNAs indicated above the panel and cells were processed for Western blotting after 72 hours. GAPDH antibody was used to monitor recovery. Mock siRNA treatments were performed in duplicate. (C) Transfection of a plasmid encoding an siRNA-resistant form of HDAC1 mRNA. Silent mutations that destroy the HDAC1 siRNA 01 annealing site were introduced into an HDAC1 expression plasmid, as described in Materials and Methods. Mutant plasmids prepared in duplicate (R1, R2) or a wt control plasmid was introduced into TI-C cells along with the HDAC1 siRNA 01. GFP expression was monitored by FACS. As shown, HDAC 01 siRNA was capable of stimulating GFP reactivation after transfection of the wt HDAC1 plasmid. In contrast, the siRNA-resistant plasmids were able to repress GFP expression in the presence of the siRNA. (D) Localization of Daxx at the GFP promoter. ChIP analysis was carried out as described in Materials and Methods. Two primer sets were used, targeting the silent viral GFP promoter region or the active cellular β-actin gene. Experiments shown are representative, and the Daxx results are averages of triplicate immunoprecipitations. IgG, immunoglobulin G.

[0022] FIG. 3 depicts the results of an example experiment demonstrating that the knockdown of several candidate proteins or treatment with various control siRNAs fails to reactivate the silent GFP reporter. (A and B) HeLa TI-C cells were treated with the indicated siRNAs and the percentages of GFP-positive cells were determined by FACS at 96 hours posttransfection. Single siRNAs were used for H3.3A, H3.3B, and HIRA. Two independent single siRNAs (designated a and b) were tested for HIRA. DF1, DharmaFECT 1 transfection reagent. (C) TI-C cells were treated with 100 nM siRNAs as indicated above the panels and cells were processed for Western blotting after 72 hours. (D) Treatment and analysis with the indicated siRNAs was as for panel A. Negative control siRNAs RISC−, RISC+, and GAPDH were analyzed. (E) The HDAC1 siRNA SMARTpool was titrated to determine the lowest effective concentration versus the negative control siRNA RISC⁺. Analysis was as for panel A.

[0023] FIG. 4 depicts the results of an example experiment evaluating TI-C silent cell clones. (A) Clones were treated with TSA or a dimethyl sulfoxide (DMSO) control, and GFP was monitored by FACS after 24 hours. (B) Cell clones were transfected with the indicated siRNAs, and GFP reactivation was monitored by FACS after 96 hours. Representative results are shown.

[0024] FIG. 5 depicts the results of an example experiment evaluating the role of HP1 isoforms in silencing maintenance. (A) HeLa TI-C cells were transfected with the indicated HP1 isoform siRNA SMARTpools, and GFP reactivation was monitored by FACS analysis after 96 hours. Abbreviations: NT, not transfected; DF1, DharmaFECT 1 transfection reagent. (B and C) Western blot analyses of siRNA knockdown of the HP1 family of proteins. Cells were transfected with the siRNAs indicated above the panels. The detection of HP1α required loading of 10-fold more protein.

[0025] FIG. 6 depicts the results of an example experiment demonstrating that the expression of a dnHP1 reactivates silent GFP. (A) Map of dnHP1. Chromo, chromodomain. (B) A retroviral vector encoding a dnHP1 was used to infect HeLa TI-C cells. Cells were placed under selection with puromycin and were monitored for reactivation of GFP expression by FACS. The FACS profile obtained at 5 days postinfection shows GFP expression in cells selected with the dnHP1 expression vector (no fill) versus the empty vector (filled). The expression of dnHP1 produced a population of GFP-positive cells (24%), some of which were very bright and appear off scale in the graph. A representative experiment is shown.

[0026] FIG. 7 depicts the results of an example experiment demonstrating the reactivation of silent GFP by viral proteins. (A and B) HeLa TI-C cells were transfected with expression plasmids encoding the indicated proteins and GFP reactivation was monitored after 48 hours by FACS analysis.

[0027] FIG. 8 depicts the results of an example experiment evaluating HeLa cells that harboring silent GFP under the control of the ASV LTR. (A and B) TI-L cells were transfected with the indicated siRNA SMARTpools and GFP expression was measured after 96 hours by FACS analysis. NT, not transfected; two independent single siRNAs tested for HIRA are designated HIRA a and b.

[0028] FIG. 9 depicts the results of an example experiment demonstrating the results of a screen of GFP-silent reporter cells with epigenetic pre-selected siRNA set (Table 1). A. Response to siRNAs is measured by percent GFP positive cells. Samples are ranked according to signal strength. Duplicate assays were carried out in 96-well plates and error bars are shown. The initial screen was carried out with two siRNAs for each target (results with one siRNA are shown and error bars are shown). Sample Group 1 signifies activation of GFP in >20% of cells (dashed red line). B. Two sample groups from Panel A are shown as an expanded view. Group 1 highlights the strongest signals and gene target names are indicated for several siRNAs. Other validated gene hits including MBD3, Ring1, HPH2, DNMT3A, and JHDM1b are not indicated in the figure for simplicity (see FIGS. 12-15). Group 2 highlights non-hits.

[0029] FIG. 10 depicts the interrelationship among factors identified using the pre-selected epigenetics siRNA set. Protein families are indicated, and specific family members identified in this functional screen are identified in parentheses. A role for an MBD protein (FIG. 12) was identified, but this adapter protein family is not depicted in this figure.

[0030] FIG. 11 depicts the results of an example experiment identifying histone methyltransferase activity that maintains epigenetic silencing. A. Results from interrogation with siRNAs targeting H3K9 methyltransferases. Data is extracted from the screen shown in FIG. 9. Shown are results with two independent siRNAs (red, blue), analyzed in duplicate (error bars). Indicated genes represent full coverage of the H3K9 HMT enzyme family, based on current knowledge. An exclusive role for SETDB1 was detected. B. Results in Panel A support roles for H3K9 methylation and possibly HP1 in silencing. ChIP analyses with carried out using standard methods. Gel is shown on left and independent quantitation is shown on the right. Both H3K9 methylation and HP1γ were detected at the silent GFP promoter, consistent with the screen results (FIG. 10).

[0031] FIG. 12 depicts the results of example experiments validating the hits and non-hits using four independent siRNAs (Qiagen) and secondary screens. Assays were carried out as described in FIG. 8. Hits (*) are defined as >20% reactivation by at least two independent siRNAs (2/4). Results show independent siRNAs producing >20% reactivation: SETDB1 (4/4), CHAF1A (4/4), MBD3 (3/4), DNMT3A (2/4) and SETDB2 (0/4, also see FIG. 11). Two secondary screens were carried out to measure false negative hits caused by nonspecific cytotoxicity (Alamar blue) or interference with GFP reporter by siRNAs. Arrow indicates the single siRNA in this set that interfered with GFP expression.

[0032] FIG. 13 depicts a summary of results with siRNAs targeting histone methyltransferases (above) and histone demethylases (below) that modify the N-terminus of histone H3 (sequence shown). Results were extracted from screen data depicted in FIG. 9A. Red circles indicate non-hits and green circles indicates hits. See FIGS. 11 and 12 for results with the SETDB1 siRNAs.

[0033] FIG. 14 depicts a summary of results with siRNAs targeting DNA methyltransferases. Results were collected from screen depicted in FIG. 9. Shown are results with two independent siRNAs (red, blue) (Qiagen) analyzed in duplicate (error bars). Indicated genes represent full coverage of the enzyme family, based on current knowledge. An exclusive role for DNMT3A was detected.

[0034] FIG. 15 depicts the results of an example experiment demonstrating the interrogation with siRNAs targeting HPH2 and Ring1, as compared with positive and negative controls (HDAC1 and GAPDH, respectively). Shown are results with four independent siRNAs for HPH2 and Ring1, analyzed in duplicate (error bars). Below are shown sample GFP intensity profiles from 96-well FACS analysis. Profiles shown correspond to samples indicated by arrows.

### DETAILED DESCRIPTION

### Definitions

[0035] Unless defined otherwise, all technical and scientific terms used herein generally have the same meaning as commonly understood by one of ordinary skill in the art to which this invention belongs. Generally, the nomenclature used herein and the laboratory procedures in cell culture, molecular genetics, organic chemistry, and nucleic acid chemistry and hybridization are those well known and commonly employed in the art. The techniques and procedures are generally performed according to conventional methods in the art and various general references (e.g., Sambrook and Russell, 2001, Molecular Cloning, A Laboratory Approach, Cold Spring Harbor Press, Cold Spring Harbor, N.Y., and Ausubel et al., 2008, Current Protocols in Molecular Biology, John Wiley & Sons, NY), which are provided throughout this document.

[0036] As used herein, each of the following terms has the meaning associated with it in this section.

[0037] The articles “a” and “an” are used herein to refer to one or to more than one (i.e., to at least one) of the grammatical object of the article. By way of example, “an element” means one element or more than one element.

[0038] “About” as used herein when referring to a measurable value such as an amount, a temporal duration, and the like, is meant to encompass variations of ±20% or ±10%, more preferably ±5%, even more preferably ±1%, and still more preferably ±0.1% from the specified value, as such variations are appropriate to perform the disclosed methods.

[0039] The term “complementary” (or “complementarity”) refers to the specific base pairing of nucleotide bases in nucleic acids. The term “perfect complementarity” as used herein refers to complete (100%) complementarity within a contiguous region of double stranded nucleic acid, such as between a hexamer or heptamer seed sequence in an miRNA and its complementary sequence in a target polynucleotide, as described in greater detail herein.

[0040] An “antisense nucleic acid” (or “antisense oligonucleotide”) is a nucleic acid molecule (RNA or DNA) which is complementary to an mRNA transcript or a selected portion thereof. Antisense nucleic acids are designed to hybridize with the transcript and, by a variety of different mechanisms, prevent if from being translated into a protein; e.g., by blocking translation or by recruiting nucleic acid-degrading enzymes to the target mRNA.

[0041] “Encoding” refers to the inherent property of specific sequences of nucleotides in a polynucleotide, such as a gene, a cDNA, or an mRNA, to serve as templates for synthesis of other polymers and macromolecules in biological processes having either a defined sequence of nucleotides (i.e., rRNA, tRNA and mRNA) or a defined sequence of amino acids and the biological properties resulting therefrom. Thus, a gene encodes a protein if transcription and translation of mRNA corresponding to that gene produces the protein in a cell or other biological system. Both the coding strand, the nucleotide sequence of which is identical to the mRNA sequence and is usually provided in sequence listings, and the non-coding strand, used as the template for transcription of a gene or cDNA, can be referred to as encoding the protein or other product of that gene or cDNA. Unless otherwise specified, a “nucleotide sequence encoding an amino acid sequence” includes all nucleotide sequences that are degenerate versions of each other and that encode the same amino acid sequence. Nucleotide sequences that encode proteins and RNA may include introns.

[0042] “Effective amount” or “therapeutically effective amount” are used interchangeably herein, and refer to an amount of a compound, formulation, material, or composition, as described herein effective to achieve a particular biological result.

[0043] As used herein “endogenous” refers to any material from or produced inside an organism, cell, tissue or system. “Exogenous” refers to any material introduced from or produced outside an organism, cell, tissue or system.

[0044] The term “expression” as used herein is defined as the transcription and/or translation of a particular nucleotide sequence driven by its promoter.

[0045] As used herein, the term “fragment,” as applied to a nucleic acid, refers to a subsequence of a larger nucleic acid. A “fragment” of a nucleic acid can be at least about 15 nucleotides in length; for example, at least about 50 nucleotides to about 100 nucleotides; at least about 100 to about 500 nucleotides, at least about 500 to about 1000 nucleotides, at least about 1000 nucleotides to about 1500 nucleotides; or about 1500 nucleotides to about 2500 nucleotides; or about 2500 nucleotides (and any integer value in between).

[0046] “Homologous, homology” or “identical, identity” as used herein, refer to comparisons among amino acid and nucleic acid sequences. When referring to nucleic acid molecules, “homology,” “identity,” or “percent identical” refers to the percent of the nucleotides of the subject nucleic acid sequence that have been matched to identical nucleotides by a sequence analysis program. Homology can be readily calculated by known methods. Nucleic acid sequences and amino acid sequences can be compared using computer programs that align the similar sequences of the nucleic or amino acids and thus define the differences. In preferred methodologies, the BLAST programs (NCBI) and parameters used therein are employed, and the DNAstar system (Madison, Wis.) is used to align sequence fragments of genomic DNA sequences. However, equivalent alignment assessments can be obtained through the use of any standard alignment software.

[0047] “Isolated” means altered or removed from the natural state. For example, a nucleic acid or a peptide naturally present in a living animal is not “isolated,” but the same nucleic acid or peptide partially or completely separated from the coexisting materials of its natural state is “isolated.” An isolated nucleic acid or protein can exist in substantially purified form, or can exist in a non-native environment such as, for example, a host cell. Unless it is particularly specified otherwise herein, the proteins, virion complexes, antibodies and other biological molecules forming the subject matter of the present invention are isolated, or can be isolated.

[0048] The term, “miRNA” or “microRNA” is used herein in accordance with its ordinary meaning in the art. miRNAs are single-stranded RNA molecules of about 20-24 nucleotides, although shorter or longer miRNAs, e.g., between 18 and 26 nucleotides in length, have been reported. miRNAs are encoded by genes that are transcribed from DNA but not translated into protein (non-coding RNA), although some miRNAs are coded by sequences that overlap protein-coding genes. miRNAs are processed from primary transcripts known as pri-miRNA to short stem-loop structures called pre-miRNA and finally to functional miRNA. Mature miRNA molecules are partially complementary to one or more messenger RNA (mRNA) molecules, and they function to regulate gene expression.

[0049] The term “operably linked” or “operably inserted” means that the regulatory sequences necessary for expression of the coding sequence are placed in a nucleic acid molecule in the appropriate positions relative to the coding sequence so as to enable expression of the coding sequence. This same definition is sometimes applied to the arrangement other transcription control elements (e.g. enhancers) in an expression vector.

[0050] Transcriptional and translational control sequences are DNA regulatory sequences, such as promoters, enhancers, polyadenylation signals, terminators, and the like, that provide for the expression of a coding sequence in a host cell.

[0051] The terms “promoter,” “promoter region” or “promoter sequence” refer generally to transcriptional regulatory regions of a gene, which may be found at the 5′ or 3′ side of the coding region, or within the coding region, or within introns. Typically, a promoter is a DNA regulatory region capable of binding RNA polymerase in a cell and initiating transcription of a downstream (3′ direction) coding sequence. The typical 5′ promoter sequence is bounded at its 3′ terminus by the transcription initiation site and extends upstream (5′ direction) to include the minimum number of bases or elements necessary to initiate transcription at levels detectable above background. Within the promoter sequence is a transcription initiation site (conveniently defined by mapping with nuclease S1), as well as protein binding domains (consensus sequences) responsible for the binding of RNA polymerase.

[0052] The terms “patient,” “subject,” “individual,” and the like are used interchangeably herein, and refer to any animal, or cells thereof whether in vitro or in situ, amenable to the methods described herein. In certain non-limiting embodiments, the patient, subject or individual is a human.

[0053] The term “polynucleotide” as used herein is defined as a chain of nucleotides. Furthermore, nucleic acids are polymers of nucleotides. Thus, nucleic acids and polynucleotides as used herein are interchangeable. One skilled in the art has the general knowledge that nucleic acids are polynucleotides, which can be hydrolyzed into the monomeric “nucleotides.” The monomeric nucleotides can be hydrolyzed into nucleosides. As used herein polynucleotides include, but are not limited to, all nucleic acid sequences which are obtained by any means available in the art, including, without limitation, recombinant means, i.e., the cloning of nucleic acid sequences from a recombinant library or a cell genome, using ordinary cloning and amplification technology, and the like, and by synthetic means. An “oligonucleotide” as used herein refers to a short polynucleotide, typically less than 100 bases in length.

[0054] The term “reporter gene” refers to a gene that encodes a product which is easily detectable by standard methods, either directly or indirectly (referred to herein as a “detectable gene product”). The term “silent reporter gene” or “epigenetically silent reporter gene” refers to a reporter gene within a cell that is not expressed due to epigenetic silencing.

[0055] The term “RNAi” or “RNA interference” as used herein refers broadly to methods for inhibiting the production of proteins by blocking protein expression with complementary RNA sequences; in other words, a sequence-specific gene silencing technology. Thus, as used herein, the term “RNAi” would include the use of antisense nucleic acids, polynucleotides, siRNA, miRNAs and ribozymes. A molecule used in RNAi is referred to herein as an RNA inhibitor, and encompasses any sequence-specific inhibitory molecule, including antisense nucleic acids, polynucleotides, siRNA, miRNAs and ribozymes.

[0056] The term “siRNA” (also “short interfering RNA” or “small interfering RNA”) is given its ordinary meaning, and refers to small strands of RNA (21-23 nucleotides) that interfere with the translation of messenger RNA in a sequence-specific manner. SiRNA binds to the complementary portion of the target messenger RNA and is believed to tag it for degradation. This function is distinguished from that of miRNA, which is believed to repress translation of mRNA but not to specify its degradation.

[0057] A cell has been “transformed,” “transduced” or “transfected” by exogenous or heterologous DNA when such DNA has been introduced inside the cell. The introduced DNA may or may not be integrated (covalently linked) into the genome of the cell. In prokaryotes, yeast, and mammalian cells for example, the introduced DNA may be maintained on an episomal element such as a plasmid. With respect to eukaryotic cells, a stably transformed or transduced cell is one in which the introduced DNA has become integrated into a chromosome so that it is inherited by daughter cells through chromosome replication. This stability is demonstrated by the ability of the eukaryotic cell to establish cell lines or clones comprised of a population of daughter cells containing the introduced DNA. A “clone” is a population of cells derived from a single cell or common ancestor by mitosis. A “cell line” is a clone of a primary cell that is capable of stable growth in vitro for many generations.

[0058] “Variant” as the term is used herein, is a nucleic acid sequence or a peptide sequence that differs in sequence from a reference nucleic acid sequence or peptide sequence respectively, but retains essential properties of the reference molecule. Changes in the sequence of a nucleic acid variant may not alter the amino acid sequence of a peptide encoded by the reference nucleic acid, or may result in amino acid substitutions, additions, deletions, fusions and truncations. A variant of a nucleic acid or peptide can be a naturally occurring such as an allelic variant, or can be a variant that is not known to occur naturally. Non-naturally occurring variants of nucleic acids and peptides may be made by mutagenesis techniques or by direct synthesis.

[0059] A “vector” is a replicon, such as plasmids, phagemids, cosmids, baculoviruses, bacmids, bacterial artificial chromosomes (BACs), yeast artificial chromosomes (YACs), as well as other bacterial, yeast and viral vectors, to which another nucleic acid segment may be operably inserted so as to bring about the replication or expression of the segment. “Expression vector” refers to a vector comprising expression control sequences operatively linked to a nucleotide sequence to be expressed. An expression vector comprises sufficient cis-acting elements for expression; other elements for expression can be supplied by the host cell or in an in vitro expression system. Expression vectors include all those known in the art, such as cosmids, plasmids (e.g., naked or contained in liposomes) and viruses (e.g., lentiviruses, retroviruses, adenoviruses, and adeno-associated viruses) that incorporate the recombinant polynucleotide.

[0060] Ranges: throughout this disclosure, various aspects of the invention can be presented in a range format. It should be understood that the description in range format is merely for convenience and brevity and should not be construed as an inflexible limitation on the scope of the invention. Accordingly, the description of a range should be considered to have specifically disclosed all the possible subranges as well as individual numerical values within that range. For example, description of a range such as from 1 to 6 should be considered to have specifically disclosed subranges such as from 1 to 3, from 1 to 4, from 1 to 5, from 2 to 4, from 2 to 6, from 3 to 6 etc., as well as individual numbers within that range, for example, 1, 2, 2.7, 3, 4, 5, 5.3, and 6. This applies regardless of the breadth of the range.

### Description:

[0061] In accordance with one aspect of the invention, a high throughput RNAi-based screen was developed, formulated on the validated principle that knockdown of factors that maintain epigenetic silencing will result in reactivation of a silent reporter gene in cells. RNAi-based screening of these silent reporter cells has identified known enzymes that place or remove epigenetic marks on histones, as well as non-enzymatic proteins that function in silencing or in transfer of marks during S-phase. In addition, in accordance with another aspect of the invention, the screen has been used to identify a number of novel gene products involved in epigenetic silencing, as described in greater detail herein.

[0062] The assay system of the invention utilizes a functional readout. Specifically, reporter cells were derived that harbor epigenetically silent reporter genes. Interrogation of these cells with target-specific RNA inhibitors identifies cellular proteins that are involved in, or responsible for, maintaining epigenetic silencing. Using a validated high throughput assay, selected genes or all known human genes can be assayed for their role in epigenetic silencing. The assay of the invention has several advantages: i) it is minimally biased, ii) it measures functions that fit the strict definition of “epigenetic,” iii) it can detect enzymatic or non-enzymatic regulators, iv) it can measure epigenetic regulation of a wide range of promoters at different chromosomal locations, and iv) the assay is validated.

[0063] The assay includes the following general steps: (a) providing a cell line comprising a genome into which is integrated an epigenetically silent reporter gene; (b) providing a mRNA inhibitor capable of inhibiting expression of a target mRNA; (c) introducing the mRNA inhibitor into the cell line, thereby inhibiting expression of the target RNA; and (d) detecting an increase in expression of the reporter gene. The increase in expression of the reporter gene is a measure of relief of epigenetic silencing, and indicates therefore that the target mRNA is involved in the epigenetic silencing.

[0064] Any transformable or transducible cell that can be maintained in culture can be used in the assay system. Indeed, in certain instances it may be advantageous to use different cell types, e.g., different types of cancer cells, for the purpose of identifying cell type-specific silencing regulators or mechanisms. In one embodiment, the cells lines are of human origin, while in another embodiment they originate with another species. In an exemplary embodiment, human HeLa cells are utilized.

[0065] A reporter gene is introduced into the selected cell line and clones containing epigenetically silent reporter genes are selected, as described in greater detail below. The reporter gene can be one that produces any detectable gene product, as is well understood in the art. In particular embodiments, reporter genes that encode spectrophotometrically or fluorescently detectable gene products (either directly colored or fluorescent, or able to produce a colored or fluorescent product) are utilized. Such detectable products include, but are not limited to, b-galactosidase, b-glucuronidase or green fluorescent protein (GFP), the latter of which is exemplified herein.

[0066] In accordance with known methods, the reporter gene is operably linked to appropriate expression elements, including promoters. Promoters may include viral promoters or cellular promoters. Nonlimiting examples include viral LTR promoters, hCMV promoters, EF1α promoters and RNA Pol II promoters.

[0067] The reporter gene can be introduced into the cell in accordance with any method known in the art. Preferably, the gene should be introduced into the cells in a manner enabling its stable integration into the genome. Certain embodiments of the invention utilize viral vectors for introduction of the reporter gene into the cells. Retroviral vectors are particularly suitable for this purpose. Among the retroviral vectors, alpharetroviruses are particularly suitable because they are known to be silenced at high frequency in mammalian cells. In an exemplary embodiment, avian sarcoma virus (ASV) vectors are utilized. The vectors utilized in the assay system should be able totransduce, but not spread in cells. As such, reporter-expressing cells represent only initial transductants and corresponding generations of daughter cells.

[0068] Methods of making cells that contain silent reporter genes have been described in the art, e.g., by Katz et al., 2007, J. Virol. 81:2592-2604. Briefly, cells are transduced with a vector comprising the reporter gene, then sorted for cells that are phenotypically silent for reporter gene expression, yet contain suitable levels of integrated reporter DNA. To assess whether the silent reporter genes can be reactivated, the silent reporter cell population can be treated with a known inhibitor of expression repressors, e.g., trichostatin A (TSA), which block the repressive histone deacetylases (HDACS), thereby relieving epigenetic silencing and activating gene expression. By carrying out repeated rounds of expression activation and silencing, a population of cells enriched in silent reporters can be obtained, and ultimately yield a pure population and clones of cells harboring silent reporter genes. Once established, this reporter-silent phenotype can be maintained during long term passage of the cells.

[0069] The central premise of the assay system is that knockdown of key factors that maintain silencing is predicted to cause reactivation of the silent reporter gene, and this can be monitored in a high throughput setting using the detectable gene product as a readout. By utilizing an RNAi-based approach, the assay can be used on a gene-by-gene basis to screen selected candidate genes (as described in detail in Example 1), or to explore various classes of genes (as described in detail in Example 3), or to canvas an entire genome.

[0070] RNAi molecules suitable for targeting selected mRNAs include any type of molecule capable of recognizing its target mRNA and interfering with the function of that mRNA. Such interference may comprise degradation of the mRNA (directly or indirectly), interference with translation, or any of a variety of other mechanisms. In one embodiment, the RNAi molecules are siRNA. In other embodiments, the RNAi molecules are miRNA or antisense nucleic acids. In some embodiments, a single mRNA inhibitor (e.g., a single siRNA) per target is employed in an assay. In other embodiments, multiple RNAi molecules (e.g., 2, 3, 4 or more) directed to a single mRNA target are employed.

[0071] In preferred embodiments, multiple targets are screened in parallel to generate a high throughput assay, in accordance with methods known in the art. For example, parallel assays may be carried out in a multi-well plate, such as a 96-well plate. An example of a 96-well plate high-throughput assay protocol is set forth in Example 2. Variations will be apparent to the skilled artisan.

[0072] As mentioned above, the effect of RNAi-mediated mRNA knockdown on epigenetic silencing is determined by measuring an increase in expression of the silent reporter gene in the cells. Any suitable detection means may be used for this purpose. In certain embodiments, the detectable gene product (or a product thereof) is spectrophotometrically or fluorescently detectable. In an exemplified embodiment, the detectable product is GFP and may be detected by way of its fluorescence. In the high throughput assay described in Example 2, GFP is detected using 96-well FACS (fluorescence activated cell sorting) instrument. A fluorescence plate reader may also be utilized.

[0073] Components of the assay systems described above may be conveniently packaged in kits. Such kits may contain, for example, various reagents for individual assays and instructions for their use. Typical kit components include, for example, (1) a cell line comprising a genome into which is integrated an epigenetically silent reporter gene; (2) one or more RNAi molecules targeted to selected mRNA targets; (3) reagents for introducing the RNAi molecules into the cells; and (4) positive and negative controls, which may be RNAi or which may be chemical inhibitors of known epigenetic silencing gene products.

[0074] The assays of the present invention have been utilized to identify a number of mRNA targets whose gene products are involved in epigenetic silencing. Example 1 describes the identification and validation of three gene products: knockdown of mRNA encoding HDAC1, the transcriptional repressor Daxx (a binding partner of HDAC1), or heterochromatin protein 1 gamma (HP1γ) resulted in robust and specific GFP reporter gene reactivation. Examples 3 and 4 describe the identification of sixteen hits from a pool of 189 target mRNAs (see Table I). These include (1) MBD1, (2) MBD2, (3) MBD3, (4) SETDB1 (also known as ESET or KMT1E), (5) DNMT3A, (6) RING1, (7) PHC2 (also known as HPH2), (8) CHAF1A (also known CAF-1 p150), (9) TRIM24 (also known as TIF1alpha), (10) TRIM33 (also known as TIF1 gamma), (11) JMJD2A (also known as KDM4A), (12) SUV420H2 (also known as KMT5C), (13) RAD21, (14) FBXL11 (also known as JHDM1a and KDM2A), (15) PBRM1 (also known as BAF180) and (16) ZMYND8.

[0075] Of the foregoing gene products, MBD1, MBD2, MBD3, SETDB1 (also known as ESET or KMT1E and DNMT3A) might have been predicted by way of their known functionality. The following two groups were less predictable: (1) RING1, PHC2 (also known as HPH2) and CHAF1A (also known CAF-1 p150); and (2) TRIM24 (also known as TIF1alpha), TRIM33 (also known as TIF1gamma), JMJD2A, KDM4A, SUV420H2 and KMT5C. The following additional two groups appear to represent novel and/or unexpected participants in epigenetic silencing: (1) RAD21, FBXL11 (also known as JHDM1a) and KDM2A; and (2) PBRM1 (also known as BAF180) and ZMYND8. Eight of the sixteen gene products identified by the 189-target screen of Example 3 are discussed in greater detail in Example 4.

[0076] Inhibitors of one or more of the gene products described above may be used to relieve epigenetic silencing in a cell. Such methods comprise introducing selected inhibitors, i.e., RNAi molecules into cells, whereupon inhibition of the target mRNA results in partial or full relief of epigenetic silencing and expression of some or all of the previously silenced genes in the cell. Such methods can be tailored to relieve certain types of silencing, for instance, by targeting certain classes of mRNAs whose gene products are involved in silencing of particular genes or particular classes of genes, or by targeting certain cell types.

[0077] The identification of gene products that participate in epigenetic silencing has significant relevance to disease, particularly cancer and other proliferative disease. Epigenetic alterations associated with cancer include histone hypoacetylation and DNA hypermethylation. Cancer cells display an imbalance in DNA methylation, characterized by global hypomethylation and hypermethylation of CpG islands. Frequently, expression of genes involved in cell cycle regulation and DNA repair are affected by these alterations in DNA methylation patterns. It is believed that inappropriate epigenetic silencing of growth control genes can be a key step in tumorogenesis. This theory is a logical extension of the tumor suppressor gene hypothesis whereby genetic mutations and deletions inactivate allelic copies of growth control genes. In terms of relevance to cancer, it is now appreciated that epigenetic effects contribute at a frequency comparable to genetic mutations. There is a significant distinction between genetic and epigenetic etiologies of cancer with respect to potential therapeutic approaches. Once genetic mutations (i.e. point mutations and rearrangements) become fixed in the genome, they are essentially irreparable. In contrast, the epigenetic marks that mediate gene silencing display significant plasticity. As such, there is great therapeutic potential in devising strategies that can relieve inappropriate epigenetic silencing. Currently, both DNMT and HDAC inhibitors are currently in use for cancer therapy. With respect to the therapeutic effects of these compounds, it is believed that their mechanism of action includes the reactivation of silent tumor suppressor genes leading to tumor cell differentiation, apoptosis, or cell cycle arrest. The efficacy of these compounds is clearly dependent on increased sensitivity of cancer cells versus normal cells. Such compounds have now been developed as clinical agents, although their mechanism of action is not well understood. Much of the uncertainty comes from the fact that HDACs and DNMTs comprise families of enzymes, and HDACs can recognize a variety of non-histone substrates. Furthermore most HDAC inhibitors have broad activity among HDAC family members. Recent studies indicate that inhibition of individual HDACs using siRNA may have potential therapeutic effects at the cellular level (Senese, et al., 2007, Mol. Cell. Biol. 27:4784-4795). Likewise, the several gene products listed above represent a wealth of additional targets for the development of cancer therapeutic agents.

### Nucleic Acid Inhibitors

[0078] Nucleic acid inhibitors according to the present invention may include any polymer or oligomer of pyrimidine and purine bases, preferably cytosine, thymine, and uracil, and adenine and guanine, respectively. (See Albert L. Lehninger, Principles of Biochemistry, at 793-800 (Worth Pub. 1982) which is herein incorporated in its entirety for all purposes). Indeed, the present invention contemplates any deoxyribonucleotide, ribonucleotide or peptide nucleic acid component, and any chemical modifications thereof, such as methylated, hydroxymethylated or glucosylated forms of these bases, and the like. The polymers or oligomers may be heterogeneous or homogeneous in composition, and may be isolated from naturally occurring sources or may be artificially or synthetically produced. In addition, the nucleic acids may be DNA or RNA, or a mixture thereof, and may exist permanently or transitionally in single-stranded or double-stranded form, including homoduplex, heteroduplex and hybrid states. By way of non-limiting examples, nucleic acids useful in the invention include sense nucleic acids, antisense nucleic acids, polynucleotides, siRNA, miRNAs and ribozymes.

In various embodiments of the invention, the nucleic acids sharing all or some portion of the sequences described herein, can be administered to a subject to diminish the level of epigenetic silencing. By way of non-limiting examples, nucleic acid reference sequences, upon which the sequences of the nucleic acid inhibitors of the invention can be based, include, but are not limited to those listed in Tables 1 and 2 and/or exemplified by SEQ ID NOS: 1, 3, 5, 7, 9, 11, 13, 15, 17, 19, 21, 23, 25, 27, 29, 31, 33, 35, 37, 39, 41, 43, 45, 47, 49, 51, 53, 55, 57, 59, 61, 63, 65, 67, 69, 71, 73, 75, 77, 79, 81, 83, 85, 87, 89, 91, 93, 95, 97, 99, 101, 103, 105, 107, 109, 111, 113, 115, 117, 119, 121, 123, 125, 127, 129, 131, 133, 135, 137, 139, 141, 143, 145, 147, 149, 151, 153, 155, 157, 159, 161, 163, 165, 167, 169, 171, 173, 175, 177, 179, 181, 183, 185, 187, 189, 191, 193, 195, 197, 199, 201, 203, 205, 207, 209, 211, 213, 215, 217, 219, 221, 223, 225, 227, 229, 231, 233, 235, 237, 239, 241, 243, 245, 247, 249, 251, 253, 255, 257, 259, 261, 263, 265, 267, 269, 271, 273, 275, 277, 279, 281, 283, 285, 287, 289, 291, 293, 295, 297, 299, 301, 303, 305, 307, 309, 311, 313, 315, 317, 319, 321, 323, 325, 327, 329, 331, 333, 335, 337, 339, 341, 343, 345, 347, 349, 351, 353, 355, 357, 359, 361, 363, 365, 367, 369, 371, 373, 375, 377, 379, 381, 383, 385, 387, 389, 391, 393, 395, 397, 399, 401, 403, 405, 407, 409, 411, 413, 415, 417, 419, 421, 423, 425, 427, 429, 431, 433, 435, 437, 439, 441, 443, 445, 447, 449, 451, 453, 455, 457, 459, 461, 463, 465, 467, 469, 471, 473, 475, 477, 479, 481, 483, 485, 487, 489, 491, 493, 495, 497, 499, 501, 503, 505, 507, 509, 511, 513, 515, 517, 519, 521, 523, 525, 527, 529, 531, 533, 535, 537, 539, 541, 543, 545, 547, 549, 551, 553, 555, 557, 559, 561, 563, 565, 567, 569, 571, 573, 575, 577, 579, 581, 583, 585, 587, 589, 591, 593, 595, 597, 599, 601, 603, 605, 607, 609, 611, 613, 615, 617, 619, 621, 623, 625, 627, 629, 631, 633, 635, 637, 639, 641, 643, 645, 647, 649, 651, 653, 655, 657, 659, 661, 663, 665, 667, 669, 671, 673, 675, 677, 679, 681, 683, 685, 687, 689, 691, 693, 695, 697, 699, 701, 703, 705, 707, 709, 711, 713, 715, 717, 719, 721, 723, 725, 727, 729, 731, 733, 735, 737, 739, 741, 743, 745, 747, 749, 751, 753, 755, 757, 759, 761, 763, 765, 767, 769, 771, 773, 775, 777, 779, 781, 783, 785, 787, 789, 791, 793, 795, 797, 799, 801, 803, 805, 807, 809, 811, 813, 815, 817, 819, 821, 823, 825, 827, 829, 831, 833, 835, 836, 837, 838, 839, 840, 841 and 842.

[0079] It will be readily understood by one skilled in the art that nucleic acid sequences useful in the methods of the invention, include not only the nucleic acid reference sequences provided herein as examples, but also include fragments, modifications and variants, as elsewhere defined herein, of the example nucleic acid reference sequences provided herein.

### Anti-Sense Nucleic Acids

[0080] In one embodiment of the invention, an antisense nucleic acid sequence, which may be expressed by a vector, is used to relieve epigenetic silencing. The antisense expression vector can be used to transfect or infect a cell or the mammal itself, thereby causing reduced epigenetic silencing.

[0081] Antisense molecules and their use for inhibiting gene expression are well known in the art (see, e.g., Cohen, 1989, In: Oligodeoxyribonucleotides, Antisense Inhibitors of Gene Expression, CRC Press). Antisense nucleic acids are DNA or RNA molecules that are complementary, as that term is defined elsewhere herein, to at least a portion of a specific mRNA molecule (Weintraub, 1990, Scientific American 262:40). In the cell, antisense nucleic acids hybridize to the corresponding mRNA, forming a double-stranded molecule and thereby inhibiting expression of the mRNA.

[0082] The use of antisense methods to inhibit the translation of genes is known in the art, and is described, for example, in Marcus-Sakura (1988, Anal. Biochem. 172:289). Such antisense molecules may be provided to the cell via genetic expression using DNA encoding the antisense molecule as taught by Inoue, 1993, U.S. Pat. No. 5,190,931.

[0083] Alternatively, antisense molecules of the invention may be made synthetically and then provided to the cell. Antisense oligomers of between about 10 to about 50, and more preferably about 20 nucleotides, are preferred, since they are easily synthesized and introduced into a target cell. Synthetic antisense molecules contemplated by the invention include oligonucleotide derivatives known in the art which have improved biological activity compared to unmodified oligonucleotides (see U.S. Pat. No. 5,023,243).

[0084] In various embodiments of the invention, antisense nucleic acids with sequences corresponding to all or some portion of the sequences exemplified herein by SEQ ID NOS: 1, 3, 5, 7, 9, 11, 13, 15, 17, 19, 21, 23, 25, 27, 29, 31, 33, 35, 37, 39, 41, 43, 45, 47, 49, 51, 53, 55, 57, 59, 61, 63, 65, 67, 69, 71, 73, 75, 77, 79, 81, 83, 85, 87, 89, 91, 93, 95, 97, 99, 101, 103, 105, 107, 109, 111, 113, 115, 117, 119, 121, 123, 125, 127, 129, 131, 133, 135, 137, 139, 141, 143, 145, 147, 149, 151, 153, 155, 157, 159, 161, 163, 165, 167, 169, 171, 173, 175, 177, 179, 181, 183, 185, 187, 189, 191, 193, 195, 197, 199, 201, 203, 205, 207, 209, 211, 213, 215, 217, 219, 221, 223, 225, 227, 229, 231, 233, 235, 237, 239, 241, 243, 245, 247, 249, 251, 253, 255, 257, 259, 261, 263, 265, 267, 269, 271, 273, 275, 277, 279, 281, 283, 285, 287, 289, 291, 293, 295, 297, 299, 301, 303, 305, 307, 309, 311, 313, 315, 317, 319, 321, 323, 325, 327, 329, 331, 333, 335, 337, 339, 341, 343, 345, 347, 349, 351, 353, 355, 357, 359, 361, 363, 365, 367, 369, 371, 373, 375, 377, 379, 381, 383, 385, 387, 389, 391, 393, 395, 397, 399, 401, 403, 405, 407, 409, 411, 413, 415, 417, 419, 421, 423, 425, 427, 429, 431, 433, 435, 437, 439, 441, 443, 445, 447, 449, 451, 453, 455, 457, 459, 461, 463, 465, 467, 469, 471, 473, 475, 477, 479, 481, 483, 485, 487, 489, 491, 493, 495, 497, 499, 501, 503, 505, 507, 509, 511, 513, 515, 517, 519, 521, 523, 525, 527, 529, 531, 533, 535, 537, 539, 541, 543, 545, 547, 549, 551, 553, 555, 557, 559, 561, 563, 565, 567, 569, 571, 573, 575, 577, 579, 581, 583, 585, 587, 589, 591, 593, 595, 597, 599, 601, 603, 605, 607, 609, 611, 613, 615, 617, 619, 621, 623, 625, 627, 629, 631, 633, 635, 637, 639, 641, 643, 645, 647, 649, 651, 653, 655, 657, 659, 661, 663, 665, 667, 669, 671, 673, 675, 677, 679, 681, 683, 685, 687, 689, 691, 693, 695, 697, 699, 701, 703, 705, 707, 709, 711, 713, 715, 717, 719, 721, 723, 725, 727, 729, 731, 733, 735, 737, 739, 741, 743, 745, 747, 749, 751, 753, 755, 757, 759, 761, 763, 765, 767, 769, 771, 773, 775, 777, 779, 781, 783, 785, 787, 789, 791, 793, 795, 797, 799, 801, 803, 805, 807, 809, 811, 813, 815, 817, 819, 821, 823, 825, 827, 829, 831, 833, 835, 836, 837, 838, 839, 840, 841 and 842, can be administered to an individual to diminish the level of epigenetic silencing.

### Ribozymes

[0085] Ribozymes and their use for inhibiting gene expression are also well known in the art (see, e.g., Cech et al., 1992, J. Biol. Chem. 267:17479-17482; Hampel et al., 1989, Biochemistry 28:4929-4933; Eckstein et al., International Publication No. WO 92/07065; Altman et al., U.S. Pat. No. 5,168,053). Ribozymes are RNA molecules possessing the ability to specifically cleave other single-stranded RNA in a manner analogous to DNA restriction endonucleases. Through the modification of nucleotide sequences encoding these RNAs, molecules can be engineered to recognize specific nucleotide sequences in an RNA molecule and cleave it (Cech, 1988, J. Amer. Med. Assn. 260:3030). A major advantage of this approach is the fact that ribozymes are sequence-specific.

[0086] There are two basic types of ribozymes, namely, tetrahymena-type (Hasselhoff, 1988, Nature 334:585) and hammerhead-type. Tetrahymena-type ribozymes recognize sequences which are four bases in length, while hammerhead-type ribozymes recognize base sequences 11-18 bases in length. The longer the sequence, the greater the likelihood that the sequence will occur exclusively in the target mRNA species. Consequently, hammerhead-type ribozymes are preferable to tetrahymena-type ribozymes for inactivating specific mRNA species, and 18-base recognition sequences are preferable to shorter recognition sequences which may occur randomly within various unrelated mRNA molecules.

In various embodiments of the invention, ribozymes that specifically cleave a sequence exemplified at least one of SEQ ID NOS: 1, 3, 5, 7, 9, 11, 13, 15, 17, 19, 21, 23, 25, 27, 29, 31, 33, 35, 37, 39, 41, 43, 45, 47, 49, 51, 53, 55, 57, 59, 61, 63, 65, 67, 69, 71, 73, 75, 77, 79, 81, 83, 85, 87, 89, 91, 93, 95, 97, 99, 101, 103, 105, 107, 109, 111, 113, 115, 117, 119, 121, 123, 125, 127, 129, 131, 133, 135, 137, 139, 141, 143, 145, 147, 149, 151, 153, 155, 157, 159, 161, 163, 165, 167, 169, 171, 173, 175, 177, 179, 181, 183, 185, 187, 189, 191, 193, 195, 197, 199, 201, 203, 205, 207, 209, 211, 213, 215, 217, 219, 221, 223, 225, 227, 229, 231, 233, 235, 237, 239, 241, 243, 245, 247, 249, 251, 253, 255, 257, 259, 261, 263, 265, 267, 269, 271, 273, 275, 277, 279, 281, 283, 285, 287, 289, 291, 293, 295, 297, 299, 301, 303, 305, 307, 309, 311, 313, 315, 317, 319, 321, 323, 325, 327, 329, 331, 333, 335, 337, 339, 341, 343, 345, 347, 349, 351, 353, 355, 357, 359, 361, 363, 365, 367, 369, 371, 373, 375, 377, 379, 381, 383, 385, 387, 389, 391, 393, 395, 397, 399, 401, 403, 405, 407, 409, 411, 413, 415, 417, 419, 421, 423, 425, 427, 429, 431, 433, 435, 437, 439, 441, 443, 445, 447, 449, 451, 453, 455, 457, 459, 461, 463, 465, 467, 469, 471, 473, 475, 477, 479, 481, 483, 485, 487, 489, 491, 493, 495, 497, 499, 501, 503, 505, 507, 509, 511, 513, 515, 517, 519, 521, 523, 525, 527, 529, 531, 533, 535, 537, 539, 541, 543, 545, 547, 549, 551, 553, 555, 557, 559, 561, 563, 565, 567, 569, 571, 573, 575, 577, 579, 581, 583, 585, 587, 589, 591, 593, 595, 597, 599, 601, 603, 605, 607, 609, 611, 613, 615, 617, 619, 621, 623, 625, 627, 629, 631, 633, 635, 637, 639, 641, 643, 645, 647, 649, 651, 653, 655, 657, 659, 661, 663, 665, 667, 669, 671, 673, 675, 677, 679, 681, 683, 685, 687, 689, 691, 693, 695, 697, 699, 701, 703, 705, 707, 709, 711, 713, 715, 717, 719, 721, 723, 725, 727, 729, 731, 733, 735, 737, 739, 741, 743, 745, 747, 749, 751, 753, 755, 757, 759, 761, 763, 765, 767, 769, 771, 773, 775, 777, 779, 781, 783, 785, 787, 789, 791, 793, 795, 797, 799, 801, 803, 805, 807, 809, 811, 813, 815, 817, 819, 821, 823, 825, 827, 829, 831, 833, 835, 836, 837, 838, 839, 840, 841 and 842, can be administered to a subject to diminish the level of epigenetic silencing.
siRNA

[0087] In one embodiment, siRNA is used to decrease the level of epigenetic silencing. RNA interference (RNAi) is a phenomenon in which the introduction of double-stranded RNA (dsRNA) into a diverse range of organisms and cell types, causes degradation of the complementary mRNA. Generally, in the cell, long dsRNAs are cleaved into shorter 21-25 nucleotide small interfering RNAs, or siRNAs, by a ribonuclease (e.g., Dicer). The siRNAs subsequently assemble with protein components into an RNA-induced silencing complex (RISC), unwinding in the process. Activated RISC then binds to a complementary transcript by base pairing interactions between the siRNA antisense strand and the mRNA. The bound mRNA is cleaved and sequence specific degradation of mRNA results in the diminution of the gene products. See, for example, U.S. Pat. No. 6,506,559; Fire et al., 1998, Nature 391(19):306-311; Timmons et al., 1998, Nature 395:854; Montgomery et al., 1998, TIG 14 (7):255-258; David R. Engelke, Ed., RNA Interference (RNAi) Nuts & Bolts of RNAi Technology, DNA Press, Eagleville, Pa. (2003); and Gregory J. Hannon, Ed., RNAi A Guide to Gene Silencing, Cold Spring Harbor Laboratory Press, Cold Spring Harbor, N.Y. (2003). Soutschek et al. (2004, Nature 432:173-178) describe a chemical modification to siRNAs that aids in intravenous systemic delivery. Optimizing siRNAs involves consideration of overall G/C content, C/T content at the termini, Tm and the nucleotide content of the 3′ overhang. See, for instance, Schwartz et al., 2003, Cell, 115:199-208 and Khvorova et al., 2003, Cell 115:209-216. Therefore, the present invention also includes methods of decreasing levels of protein using RNAi technology.

### Modification of Nucleic Acids

[0088] Following the generation of the nucleic acid inhibitors of the present invention, a skilled artisan will understand that the nucleic acid will have certain characteristics that can be modified to improve the nucleic acid as a therapeutic compound. Therefore, the nucleic acid may be further designed to resist degradation by modifying it to include phosphorothioate, or other linkages, methylphosphonate, sulfone, sulfate, ketyl, phosphorodithioate, phosphoramidate, phosphate esters, and the like (see, e.g., Agrwal et al., 1987 Tetrahedron Lett. 28:3539-3542; Stec et al., 1985 Tetrahedron Lett. 26:2191-2194; Moody et al., 1989 Nucleic Acids Res. 12:4769-4782; Eckstein, 1989 Trends Biol. Sci. 14:97-100; Stein, In: Oligodeoxynucleotides. Antisense Inhibitors of Gene Expression, Cohen, ed., Macmillan Press, London, pp. 97-117 (1989)).

[0089] Any nucleic acid of the invention may be further modified to increase its stability in vivo. Possible modifications include, but are not limited to, the addition of flanking sequences at the 5′ and/or 3′ ends; the use of phosphorothioate or 2′ O-methyl rather than phosphodiester linkages in the backbone; and/or the inclusion of nontraditional bases such as inosine, queosine, and wybutosine and the like, as well as acetyl-methyl-, thio- and other modified forms of adenine, cytidine, guanine, thymine, and uridine.

### Vectors

[0090] In other related aspects, the invention includes an isolated nucleic acid encoding an nucleic acid inhibitor, such as, for example, an antisense nucleic acid, a polynucleotide, a ribozyme, an miRNA or an siRNA, wherein the isolated nucleic acid encoding the nucleic acid inhibitor is operably linked to a nucleic acid comprising a promoter/regulatory sequence. Thus, the invention encompasses expression vectors and methods for the introduction of exogenous DNA into cells with concomitant expression of the exogenous DNA in the cells such as those described, for example, in Sambrook et al. (2001, Molecular Cloning: A Laboratory Manual, Cold Spring Harbor Laboratory, New York), and in Ausubel et al. (1997, Current Protocols in Molecular Biology, John Wiley & Sons, New York).

[0091] In another aspect, the invention includes a vector comprising an siRNA polynucleotide. Preferably, the siRNA polynucleotide is capable of inhibiting the expression of a target mRNA, such as one listed in Tables 1 or 2, and/or exemplified by SEQ ID NOS: 1, 3, 5, 7, 9, 11, 13, 15, 17, 19, 21, 23, 25, 27, 29, 31, 33, 35, 37, 39, 41, 43, 45, 47, 49, 51, 53, 55, 57, 59, 61, 63, 65, 67, 69, 71, 73, 75, 77, 79, 81, 83, 85, 87, 89, 91, 93, 95, 97, 99, 101, 103, 105, 107, 109, 111, 113, 115, 117, 119, 121, 123, 125, 127, 129, 131, 133, 135, 137, 139, 141, 143, 145, 147, 149, 151, 153, 155, 157, 159, 161, 163, 165, 167, 169, 171, 173, 175, 177, 179, 181, 183, 185, 187, 189, 191, 193, 195, 197, 199, 201, 203, 205, 207, 209, 211, 213, 215, 217, 219, 221, 223, 225, 227, 229, 231, 233, 235, 237, 239, 241, 243, 245, 247, 249, 251, 253, 255, 257, 259, 261, 263, 265, 267, 269, 271, 273, 275, 277, 279, 281, 283, 285, 287, 289, 291, 293, 295, 297, 299, 301, 303, 305, 307, 309, 311, 313, 315, 317, 319, 321, 323, 325, 327, 329, 331, 333, 335, 337, 339, 341, 343, 345, 347, 349, 351, 353, 355, 357, 359, 361, 363, 365, 367, 369, 371, 373, 375, 377, 379, 381, 383, 385, 387, 389, 391, 393, 395, 397, 399, 401, 403, 405, 407, 409, 411, 413, 415, 417, 419, 421, 423, 425, 427, 429, 431, 433, 435, 437, 439, 441, 443, 445, 447, 449, 451, 453, 455, 457, 459, 461, 463, 465, 467, 469, 471, 473, 475, 477, 479, 481, 483, 485, 487, 489, 491, 493, 495, 497, 499, 501, 503, 505, 507, 509, 511, 513, 515, 517, 519, 521, 523, 525, 527, 529, 531, 533, 535, 537, 539, 541, 543, 545, 547, 549, 551, 553, 555, 557, 559, 561, 563, 565, 567, 569, 571, 573, 575, 577, 579, 581, 583, 585, 587, 589, 591, 593, 595, 597, 599, 601, 603, 605, 607, 609, 611, 613, 615, 617, 619, 621, 623, 625, 627, 629, 631, 633, 635, 637, 639, 641, 643, 645, 647, 649, 651, 653, 655, 657, 659, 661, 663, 665, 667, 669, 671, 673, 675, 677, 679, 681, 683, 685, 687, 689, 691, 693, 695, 697, 699, 701, 703, 705, 707, 709, 711, 713, 715, 717, 719, 721, 723, 725, 727, 729, 731, 733, 735, 737, 739, 741, 743, 745, 747, 749, 751, 753, 755, 757, 759, 761, 763, 765, 767, 769, 771, 773, 775, 777, 779, 781, 783, 785, 787, 789, 791, 793, 795, 797, 799, 801, 803, 805, 807, 809, 811, 813, 815, 817, 819, 821, 823, 825, 827, 829, 831, 833, 835, 836, 837, 838, 839, 840, 841 and 842. The incorporation of a desired nucleic acid into a vector and the choice of vectors is well-known in the art as described in, for example, Sambrook et al., supra, and Ausubel et al., supra.

[0092] The nucleic acid inhibitor can be cloned into a number of types of vectors. However, the present invention should not be construed to be limited to any particular vector. Instead, the present invention should be construed to encompass a wide plethora of vectors which are readily available and/or well-known in the art. For example, nucleic acid inhibitor of the invention can be cloned into a vector including, but not limited to a plasmid, a phagemid, a phage derivative, an animal virus and a cosmid. Vectors of particular interest include expression vectors, replication vectors, probe generation vectors and sequencing vectors.

[0093] In specific embodiments, the expression vector is selected from the group consisting of a viral vector, a bacterial vector and a mammalian cell vector. Numerous expression vector systems exist that comprise at least a part or all of the compositions discussed above. Prokaryote- and/or eukaryote-vector based systems can be employed for use with the present invention to produce polynucleotides. Many such systems are commercially and widely available.

[0094] Further, the expression vector may be provided to a cell in the form of a viral vector. Viral vector technology is well known in the art and is described, for example, in Sambrook et al. (2001), and in Ausubel et al. (1997), and in other virology and molecular biology manuals. Viruses, which are useful as vectors include, but are not limited to, retroviruses, adenoviruses, adeno-associated viruses, herpes viruses and lentiviruses. In general, a suitable vector contains an origin of replication functional in at least one organism, a promoter sequence, convenient restriction endonuclease sites, and one or more selectable markers. (See, e.g., WO 01/96584; WO 01/29058; and U.S. Pat. No. 6,326,193.

[0095] For expression of the nucleic acid inhibitor of the invention, at least one module in each promoter functions to position the start site for RNA synthesis. The best known example of this is the TATA box, but in some promoters lacking a TATA box, such as the promoter for the mammalian terminal deoxynucleotidyl transferase gene and the promoter for the SV40 genes, a discrete element overlying the start site itself helps to fix the place of initiation.

[0096] Additional promoter elements, i.e., enhancers, regulate the frequency of transcriptional initiation. Typically, these are located in the region 30-110 bp upstream of the start site, although a number of promoters have recently been shown to contain functional elements downstream of the start site as well. The spacing between promoter elements frequently is flexible, so that promoter function is preserved when elements are inverted or moved relative to one another. In the thymidine kinase (tk) promoter, the spacing between promoter elements can be increased to 50 bp apart before activity begins to decline. Depending on the promoter, it appears that individual elements can function either co-operatively or independently to activate transcription.

[0097] A promoter may be one naturally associated with a gene or polynucleotide sequence, as may be obtained by isolating the 5′ non-coding sequences located upstream of the coding segment and/or exon. Such a promoter can be referred to as “endogenous.” Similarly, an enhancer may be one naturally associated with a polynucleotide sequence, located either downstream or upstream of that sequence. Alternatively, certain advantages will be gained by positioning the coding polynucleotide segment under the control of a recombinant or heterologous promoter, which refers to a promoter that is not normally associated with a polynucleotide sequence in its natural environment. A recombinant or heterologous enhancer refers also to an enhancer not normally associated with a polynucleotide sequence in its natural environment. Such promoters or enhancers may include promoters or enhancers of other genes, and promoters or enhancers isolated from any other prokaryotic, viral, or eukaryotic cell, and promoters or enhancers not “naturally occurring,” i.e., containing different elements of different transcriptional regulatory regions, and/or mutations that alter expression. In addition to producing nucleic acid sequences of promoters and enhancers synthetically, sequences may be produced using recombinant cloning and/or nucleic acid amplification technology, including PCR™, in connection with the compositions disclosed herein (U.S. Pat. No. 4,683,202, U.S. Pat. No. 5,928,906). Furthermore, it is contemplated that control sequences that direct transcription and/or expression of sequences within non-nuclear organelles such as mitochondria, chloroplasts, and the like, can be employed as well.

[0098] Naturally, it will be important to employ a promoter and/or enhancer that effectively directs the expression of the DNA segment in the cell type, organelle and organism chosen for expression. Those of skill in the art of molecular biology generally know how to use promoters, enhancers and cell type combinations for protein expression, for example, see Sambrook et al. (2001). The promoters employed may be constitutive, tissue-specific, inducible and/or useful under the appropriate conditions to direct high level expression of the introduced DNA segment, such as is advantageous in the large-scale production of recombinant proteins and/or peptides. The promoter may be heterologous or endogenous.

[0099] A promoter sequence exemplified in the experimental examples presented herein is the cytomegalovirus (CMV) promoter sequence. This promoter sequence is a strong constitutive promoter sequence capable of driving high levels of expression of any polynucleotide sequence operatively linked thereto. However, other constitutive promoter sequences may also be used, including, but not limited to the simian virus 40 (SV40) early promoter, mouse mammary tumor virus (MMTV), human immunodeficiency virus (HIV) long terminal repeat (LTR) promoter, Moloney virus promoter, the avian leukemia virus promoter, Epstein-Barr virus immediate early promoter, Rous sarcoma virus promoter, as well as human gene promoters such as, but not limited to, the actin promoter, the myosin promoter, the hemoglobin promoter, and the muscle creatine promoter. Further, the invention should not be limited to the use of constitutive promoters. Inducible promoters are also contemplated as part of the invention. The use of an inducible promoter in the invention provides a molecular switch capable of turning on expression of the polynucleotide sequence which it is operatively linked when such expression is desired, or turning off the expression when expression is not desired. Examples of inducible promoters include, but are not limited to a metallothionine promoter, a glucocorticoid promoter, a progesterone promoter, and a tetracycline promoter. Further, the invention includes the use of a tissue specific promoter, which promoter is active only in a desired tissue. Tissue specific promoters are well known in the art and include, but are not limited to, the HER-2 promoter and the PSA associated promoter sequences.

[0100] In order to assess the expression of the nucleic acid inhibitor of the invention, the expression vector to be introduced into a cell can also contain either a selectable marker gene or a reporter gene or both to facilitate identification and selection of expressing cells from the population of cells sought to be transfected or infected through viral vectors. In other embodiments, the selectable marker may be carried on a separate piece of DNA and used in a co-transfection procedure. Both selectable markers and reporter genes may be flanked with appropriate regulatory sequences to enable expression in the host cells. Useful selectable markers are known in the art and include, for example, antibiotic-resistance genes, such as neo and the like.

[0101] Reporter genes are used for identifying potentially transfected cells and for evaluating the functionality of regulatory sequences. Reporter genes that encode for easily assayable proteins are well known in the art. In general, a reporter gene is a gene that is not present in or expressed by the recipient organism or tissue and that encodes a protein whose expression is manifested by some easily detectable property, e.g., enzymatic activity. Expression of the reporter gene is assayed at a suitable time after the DNA has been introduced into the recipient cells.

[0102] Suitable reporter genes may include genes encoding luciferase, beta-galactosidase, chloramphenicol acetyl transferase, secreted alkaline phosphatase, or the green fluorescent protein gene (see, e.g., Ui-Tei et al., 2000 FEBS Lett. 479:79-82). Suitable expression systems are well known and may be prepared using well known techniques or obtained commercially. Internal deletion constructs may be generated using unique internal restriction sites or by partial digestion of non-unique restriction sites. Constructs may then be transfected into cells. In general, the construct with the minimal 5′ flanking region showing the highest level of expression of reporter gene is identified as the promoter. Such promoter regions may be linked to a reporter gene and used to evaluate agents for the ability to modulate promoter-driven transcription.

### Methods of Administration

[0103] The methods of the invention comprise administering a therapeutically effective amount of at least one nucleic acid, having a sequence exemplified by at least one of SEQ ID NOS: 1, 3, 5, 7, 9, 11, 13, 15, 17, 19, 21, 23, 25, 27, 29, 31, 33, 35, 37, 39, 41, 43, 45, 47, 49, 51, 53, 55, 57, 59, 61, 63, 65, 67, 69, 71, 73, 75, 77, 79, 81, 83, 85, 87, 89, 91, 93, 95, 97, 99, 101, 103, 105, 107, 109, 111, 113, 115, 117, 119, 121, 123, 125, 127, 129, 131, 133, 135, 137, 139, 141, 143, 145, 147, 149, 151, 153, 155, 157, 159, 161, 163, 165, 167, 169, 171, 173, 175, 177, 179, 181, 183, 185, 187, 189, 191, 193, 195, 197, 199, 201, 203, 205, 207, 209, 211, 213, 215, 217, 219, 221, 223, 225, 227, 229, 231, 233, 235, 237, 239, 241, 243, 245, 247, 249, 251, 253, 255, 257, 259, 261, 263, 265, 267, 269, 271, 273, 275, 277, 279, 281, 283, 285, 287, 289, 291, 293, 295, 297, 299, 301, 303, 305, 307, 309, 311, 313, 315, 317, 319, 321, 323, 325, 327, 329, 331, 333, 335, 337, 339, 341, 343, 345, 347, 349, 351, 353, 355, 357, 359, 361, 363, 365, 367, 369, 371, 373, 375, 377, 379, 381, 383, 385, 387, 389, 391, 393, 395, 397, 399, 401, 403, 405, 407, 409, 411, 413, 415, 417, 419, 421, 423, 425, 427, 429, 431, 433, 435, 437, 439, 441, 443, 445, 447, 449, 451, 453, 455, 457, 459, 461, 463, 465, 467, 469, 471, 473, 475, 477, 479, 481, 483, 485, 487, 489, 491, 493, 495, 497, 499, 501, 503, 505, 507, 509, 511, 513, 515, 517, 519, 521, 523, 525, 527, 529, 531, 533, 535, 537, 539, 541, 543, 545, 547, 549, 551, 553, 555, 557, 559, 561, 563, 565, 567, 569, 571, 573, 575, 577, 579, 581, 583, 585, 587, 589, 591, 593, 595, 597, 599, 601, 603, 605, 607, 609, 611, 613, 615, 617, 619, 621, 623, 625, 627, 629, 631, 633, 635, 637, 639, 641, 643, 645, 647, 649, 651, 653, 655, 657, 659, 661, 663, 665, 667, 669, 671, 673, 675, 677, 679, 681, 683, 685, 687, 689, 691, 693, 695, 697, 699, 701, 703, 705, 707, 709, 711, 713, 715, 717, 719, 721, 723, 725, 727, 729, 731, 733, 735, 737, 739, 741, 743, 745, 747, 749, 751, 753, 755, 757, 759, 761, 763, 765, 767, 769, 771, 773, 775, 777, 779, 781, 783, 785, 787, 789, 791, 793, 795, 797, 799, 801, 803, 805, 807, 809, 811, 813, 815, 817, 819, 821, 823, 825, 827, 829, 831, 833, 835, 836, 837, 838, 839, 840, 841 and 842, to a subject, where the nucleic acid reduces, diminishes or decreases the level of epigenetic silencing. In a preferred embodiment the subject is a mammal. In a more preferred embodiment the subject is a human.

[0104] Decreasing the level of expression of a gene production, such as a mRNA exemplified by at least one of SEQ ID NOS: 1, 3, 5, 7, 9, 11, 13, 15, 17, 19, 21, 23, 25, 27, 29, 31, 33, 35, 37, 39, 41, 43, 45, 47, 49, 51, 53, 55, 57, 59, 61, 63, 65, 67, 69, 71, 73, 75, 77, 79, 81, 83, 85, 87, 89, 91, 93, 95, 97, 99, 101, 103, 105, 107, 109, 111, 113, 115, 117, 119, 121, 123, 125, 127, 129, 131, 133, 135, 137, 139, 141, 143, 145, 147, 149, 151, 153, 155, 157, 159, 161, 163, 165, 167, 169, 171, 173, 175, 177, 179, 181, 183, 185, 187, 189, 191, 193, 195, 197, 199, 201, 203, 205, 207, 209, 211, 213, 215, 217, 219, 221, 223, 225, 227, 229, 231, 233, 235, 237, 239, 241, 243, 245, 247, 249, 251, 253, 255, 257, 259, 261, 263, 265, 267, 269, 271, 273, 275, 277, 279, 281, 283, 285, 287, 289, 291, 293, 295, 297, 299, 301, 303, 305, 307, 309, 311, 313, 315, 317, 319, 321, 323, 325, 327, 329, 331, 333, 335, 337, 339, 341, 343, 345, 347, 349, 351, 353, 355, 357, 359, 361, 363, 365, 367, 369, 371, 373, 375, 377, 379, 381, 383, 385, 387, 389, 391, 393, 395, 397, 399, 401, 403, 405, 407, 409, 411, 413, 415, 417, 419, 421, 423, 425, 427, 429, 431, 433, 435, 437, 439, 441, 443, 445, 447, 449, 451, 453, 455, 457, 459, 461, 463, 465, 467, 469, 471, 473, 475, 477, 479, 481, 483, 485, 487, 489, 491, 493, 495, 497, 499, 501, 503, 505, 507, 509, 511, 513, 515, 517, 519, 521, 523, 525, 527, 529, 531, 533, 535, 537, 539, 541, 543, 545, 547, 549, 551, 553, 555, 557, 559, 561, 563, 565, 567, 569, 571, 573, 575, 577, 579, 581, 583, 585, 587, 589, 591, 593, 595, 597, 599, 601, 603, 605, 607, 609, 611, 613, 615, 617, 619, 621, 623, 625, 627, 629, 631, 633, 635, 637, 639, 641, 643, 645, 647, 649, 651, 653, 655, 657, 659, 661, 663, 665, 667, 669, 671, 673, 675, 677, 679, 681, 683, 685, 687, 689, 691, 693, 695, 697, 699, 701, 703, 705, 707, 709, 711, 713, 715, 717, 719, 721, 723, 725, 727, 729, 731, 733, 735, 737, 739, 741, 743, 745, 747, 749, 751, 753, 755, 757, 759, 761, 763, 765, 767, 769, 771, 773, 775, 777, 779, 781, 783, 785, 787, 789, 791, 793, 795, 797, 799, 801, 803, 805, 807, 809, 811, 813, 815, 817, 819, 821, 823, 825, 827, 829, 831, 833, 835, 836, 837, 838, 839, 840, 841 and 842, includes decreasing the half-life or stability of the mRNA, decreasing the level of translation of the mRNA, or decreasing the level of the polypeptide exemplified by at least one of SEQ ID NOS: 2, 4, 6, 8, 10, 12, 14, 16, 18, 20, 22, 24, 26, 28, 30, 32, 34, 36, 38, 40, 42, 44, 46, 48, 50, 52, 54, 56, 58, 60, 62, 64, 66, 68, 70, 72, 74, 76, 78, 80, 82, 84, 86, 88, 90, 92, 94, 96, 98, 100, 102, 104, 106, 108, 110, 112, 114, 116, 118, 120, 122, 124, 126, 128, 130, 132, 134, 136, 138, 140, 142, 144, 146, 148, 150, 152, 154, 156, 158, 160, 162, 164, 166, 168, 170, 172, 174, 176, 178, 180, 182, 184, 186, 188, 190, 192, 194, 196, 198, 200, 202, 204, 206, 208, 210, 212, 214, 216, 218, 220, 222, 224, 226, 228, 230, 232, 234, 236, 238, 240, 242, 244, 246, 248, 250, 252, 254, 256, 258, 260, 262, 264, 266, 268, 270, 272, 274, 276, 278, 280, 282, 284, 286, 288, 290, 292, 294, 296, 298, 300, 302, 304, 306, 308, 310, 312, 314, 316, 318, 320, 322, 324, 326, 328, 330, 332, 334, 336, 338, 340, 342, 344, 346, 348, 350, 352, 354, 356, 358, 360, 362, 364, 366, 368, 370, 372, 374, 376, 378, 380, 382, 384, 386, 388, 390, 392, 394, 396, 398, 400, 402, 404, 406, 408, 410, 412, 414, 416, 418, 420, 422, 424, 426, 428, 430, 432, 434, 436, 438, 440, 442, 444, 446, 448, 450, 452, 454, 456, 458, 460, 462, 464, 466, 468, 470, 472, 474, 476, 478, 480, 482, 484, 486, 488, 490, 492, 494, 496, 498, 500, 502, 504, 506, 508, 510, 512, 514, 516, 518, 520, 522, 524, 526, 528, 530, 532, 534, 536, 538, 540, 542, 544, 546, 548, 550, 552, 554, 556, 558, 560, 562, 564, 566, 568, 570, 572, 574, 576, 578, 580, 582, 584, 586, 588, 590, 592, 594, 596, 598, 600, 602, 604, 606, 608, 610, 612, 614, 616, 618, 620, 622, 624, 626, 628, 630, 632, 634, 636, 638, 640, 642, 644, 646, 648, 650, 652, 654, 656, 658, 660, 662, 664, 666, 668, 670, 672, 674, 676, 678, 680, 682, 684, 686, 688, 690, 692, 694, 696, 698, 700, 702, 704, 706, 708, 710, 712, 714, 716, 718, 720, 722, 724, 726, 728, 730, 732, 734, 736, 738, 740, 742, 744, 746, 748, 750, 752, 754, 756, 758, 760, 762, 764, 766, 768, 770, 772, 774, 776, 778, 780, 782, 784, 786, 788, 790, 792, 794, 796, 798, 800, 802, 804, 806, 808, 810, 812, 814, 816, 818, 820, 822, 824, 826, 828, 830, 832 and 834. Methods of decreasing expression of mRNA include, but are not limited to, methods that use an siRNA, a miRNA, an antisense nucleic acid, a ribozyme, a polynucleotide or other specific inhibitors of mRNA, as well as combinations thereof.

[0105] The present invention should in no way be construed to be limited to the inhibitors described herein, but rather should be construed to encompass any inhibitor of any one of the mRNAs exemplified by SEQ ID NOS: 1, 3, 5, 7, 9, 11, 13, 15, 17, 19, 21, 23, 25, 27, 29, 31, 33, 35, 37, 39, 41, 43, 45, 47, 49, 51, 53, 55, 57, 59, 61, 63, 65, 67, 69, 71, 73, 75, 77, 79, 81, 83, 85, 87, 89, 91, 93, 95, 97, 99, 101, 103, 105, 107, 109, 111, 113, 115, 117, 119, 121, 123, 125, 127, 129, 131, 133, 135, 137, 139, 141, 143, 145, 147, 149, 151, 153, 155, 157, 159, 161, 163, 165, 167, 169, 171, 173, 175, 177, 179, 181, 183, 185, 187, 189, 191, 193, 195, 197, 199, 201, 203, 205, 207, 209, 211, 213, 215, 217, 219, 221, 223, 225, 227, 229, 231, 233, 235, 237, 239, 241, 243, 245, 247, 249, 251, 253, 255, 257, 259, 261, 263, 265, 267, 269, 271, 273, 275, 277, 279, 281, 283, 285, 287, 289, 291, 293, 295, 297, 299, 301, 303, 305, 307, 309, 311, 313, 315, 317, 319, 321, 323, 325, 327, 329, 331, 333, 335, 337, 339, 341, 343, 345, 347, 349, 351, 353, 355, 357, 359, 361, 363, 365, 367, 369, 371, 373, 375, 377, 379, 381, 383, 385, 387, 389, 391, 393, 395, 397, 399, 401, 403, 405, 407, 409, 411, 413, 415, 417, 419, 421, 423, 425, 427, 429, 431, 433, 435, 437, 439, 441, 443, 445, 447, 449, 451, 453, 455, 457, 459, 461, 463, 465, 467, 469, 471, 473, 475, 477, 479, 481, 483, 485, 487, 489, 491, 493, 495, 497, 499, 501, 503, 505, 507, 509, 511, 513, 515, 517, 519, 521, 523, 525, 527, 529, 531, 533, 535, 537, 539, 541, 543, 545, 547, 549, 551, 553, 555, 557, 559, 561, 563, 565, 567, 569, 571, 573, 575, 577, 579, 581, 583, 585, 587, 589, 591, 593, 595, 597, 599, 601, 603, 605, 607, 609, 611, 613, 615, 617, 619, 621, 623, 625, 627, 629, 631, 633, 635, 637, 639, 641, 643, 645, 647, 649, 651, 653, 655, 657, 659, 661, 663, 665, 667, 669, 671, 673, 675, 677, 679, 681, 683, 685, 687, 689, 691, 693, 695, 697, 699, 701, 703, 705, 707, 709, 711, 713, 715, 717, 719, 721, 723, 725, 727, 729, 731, 733, 735, 737, 739, 741, 743, 745, 747, 749, 751, 753, 755, 757, 759, 761, 763, 765, 767, 769, 771, 773, 775, 777, 779, 781, 783, 785, 787, 789, 791, 793, 795, 797, 799, 801, 803, 805, 807, 809, 811, 813, 815, 817, 819, 821, 823, 825, 827, 829, 831, 833, 835, 836, 837, 838, 839, 840, 841 and 842, both known and unknown, that diminishes and reduces targent RNA expression and/or that diminishes and reduces epigenetic silencing.

[0106] The methods of the invention comprise administering a therapeutically effective amount of at least one nucleic acid inhibitor to a mammal wherein a nucleic acid inhibitor, or combination thereof prevents, attenuates, reduces or diminishes targent mRNA expression and/or that prevents, attenuates, reduces or diminishes epigenetic silencing.

[0107] The method of the invention comprises administering a therapeutically effective amount of at least one nucleic acid inhibitor to a subject wherein a composition of the present invention comprising a nucleic acid inhibitor, or a combination thereof is used either alone or in combination with other therapeutic agents. The invention can be used in combination with other treatment modalities, such as chemotherapy, radiation therapy, and the like. Examples of chemotherapeutic agents that can be used in combination with the methods of the invention include, for example, carboplatin, paclitaxel, and docetaxel, cisplatin, doxorubicin, and topotecan, as well as others chemotherapeutic agents useful as a combination therapy that may discovered in the future.

[0108] Isolated nucleic acid-based inhibitors can be delivered to a cell in vitro or in vivo using vectors comprising one or more isolated nucleic acid inhibitor sequences. In some embodiments, the nucleic acid sequence has been incorporated into the genome of the vector. The vector comprising an isolated nucleic acid inhibitor described herein can be contacted with a cell in vitro or in vivo and infection or transfection can occur. The cell can then be used experimentally to study, for example, the effect of an isolated nucleic acid inhibitor in vitro. The cell can be migratory or non-migratory. The cell can be present in a biological sample obtained from the subject (e.g., blood, bone marrow, tissue, fluids, organs, etc.) and used in the treatment of disease, or can be obtained from cell culture.

[0109] Various vectors can be used to introduce an isolated nucleic acid inhibitor into mammalian cells. Examples of viral vectors have been discussed elsewhere herein and include retrovirus, adenovirus, parvovirus (e.g., adeno-associated viruses), coronavirus, negative-strand RNA viruses such as orthomyxovirus (e.g., influenza virus), rhabdovirus (e.g., rabies and vesicular stomatitis virus), paramyxovirus (e.g. measles and Sendai), positive-strand RNA viruses such as picornavirus and alphavirus, and double stranded DNA viruses including adenovirus, herpesvirus (e.g., herpes simplex virus types 1 and 2, Epstein-Barr virus, cytomegalovirus), and poxvirus (e.g. vaccinia, fowlpox and canarypox). Other viruses include Norwalk virus, togavirus, flavivirus, reoviruses, papovavirus, hepadnavirus and hepatitis virus, for example. Examples of retroviruses include: avian leukosis-sarcoma, mammalian C-type, B-type viruses, D-type viruses, HTLV-BLV group, lentivirus, spumavirus (Coffin, J. M., Retroviridae: The viruses and their replication, In Fundamental Virology, Third Edition, B. N. Fields et al., Eds., Lippincott-Raven Publishers, Philadelphia, 1996). Other examples include murine leukemia viruses, murine sarcoma viruses, mouse mammary tumor virus, bovine leukemia virus, feline leukemia virus, feline sarcoma virus, avian leukemia virus, human T-cell leukemia virus, baboon endogenous virus, Gibbon ape leukemia virus, Mason Pfizer monkey virus, simian immunodeficiency virus, simian sarcoma virus, Rous sarcoma virus, lentiviruses and baculoviruses.

[0110] In addition, an engineered viral vector can be used to deliver an isolated nucleic acid inhibitor of the present invention. These vectors provide a means to introduce nucleic acids into cycling and quiescent cells, and have been modified to reduce cytotoxicity and to improve genetic stability. The preparation and use of engineered Herpes simplex virus type 1 (Krisky et al., 1997, Gene Therapy 4:1120-1125), adenoviral (Amalfitanl et al., 1998, Journal of Virology 72:926-933) attenuated lentiviral (Zufferey et al., 1997, Nature Biotechnology 15:871-875) and adenoviral/retroviral chimeric (Feng et al., 1997, Nature Biotechnology 15:866-870) vectors are known to the skilled artisan. In addition to delivery through the use of vectors, an isolated a nucleic acid inhibitor can be delivered to cells without vectors, e.g. as “naked” nucleic acid delivery using methods known to those of skill in the art. See, for example, U.S. Pat. Nos. 5,350,674 and 5,585,362.

[0111] Physical methods for introducing a nucleic acid into a host cell include transfection, calcium phosphate precipitation, lipofection, particle bombardment, microinjection, electroporation and the like. Methods for producing cells comprising vectors and/or exogenous nucleic acids are well-known in the art. See, for example, Sambrook et al. (2001, Molecular Cloning: A Laboratory Manual, Cold Spring Harbor Laboratory, New York), and in Ausubel et al. (2001, Current Protocols in Molecular Biology, John Wiley & Sons, New York).

[0112] Chemical means for introducing a nucleic acid into a host cell include colloidal dispersion systems, such as macromolecule complexes, nanocapsules, microspheres, beads, and lipid-based systems including oil-in-water emulsions, micelles, mixed micelles and liposomes. A preferred colloidal system for use as a delivery vehicle in vitro and in vivo is a liposome (i.e., an artificial membrane vesicle). The preparation and use of such systems is well known in the art.

[0113] Various forms of an isolated nucleic acid inhibitor, as described herein, can be administered or delivered to a mammalian cell (e.g., by virus, direct injection, or liposomes, or by any other suitable methods known in the art or later developed). The methods of delivery can be modified to target certain cells, and in particular, cell surface receptor molecules. As an example, the use of cationic lipids as a carrier for nucleic acid constructs provides an efficient means of delivering the isolated nucleic acid inhibitor of the present invention.

[0114] Various formulations of cationic lipids have been used to deliver nucleic acids to cells (WO 91/17424; WO 91/16024; U.S. Pat. Nos. 4,897,355; 4,946,787; 5,049,386; and 5,208,036). Cationic lipids have also been used to introduce foreign nucleic acids into frog and rat cells in vivo (Holt et al., Neuron 4:203-214 (1990); Hazinski et al., Am. J. Respr. Cell. Mol. Biol. 4:206-209 (1991)). Therefore, cationic lipids may be used, generally, as pharmaceutical carriers to provide biologically active substances (for example, see WO 91/17424; WO 91/16024; and WO 93/03709). Thus, cationic liposomes can provide an efficient carrier for the introduction of nucleic acids into a cell.

[0115] Further, liposomes can be used as carriers to deliver a nucleic acid to a cell, tissue or organ. Liposomes comprising neutral or anionic lipids do not generally fuse with the target cell surface, but are taken up phagocytically, and the nucleic acids are subsequently subjected to the degradative enzymes of the lysosomal compartment (Straubinger et al., 1983, Methods Enzymol. 101:512-527; Mannino et al., 1988, Biotechniques 6:682-690). However, as demonstrated by the data disclosed herein, an isolated siRNA of the present invention is a stable nucleic acid, and thus, may not be susceptible to degradative enzymes. Further, despite the fact that the aqueous space of typical liposomes may be too small to accommodate large macromolecules, the isolated nucleic acid inhibitor of the present invention is relatively small, and therefore, liposomes are a suitable delivery vehicle for the present invention. Methods of delivering a nucleic acid to a cell, tissue or organism, including liposome-mediated delivery, are known in the art and are described in, for example, Feigner (Gene Transfer and Expression Protocols Vol. 7, Murray, E. J. Ed., Humana Press, New Jersey, (1991)).

[0116] In other related aspects, the invention includes an isolated nucleic acid inhibitor operably linked to a nucleic acid comprising a promoter/regulatory sequence such that the nucleic acid is preferably capable of delivering an isolated nucleic acid inhibitor. Thus, the invention encompasses expression vectors and methods for the introduction of an isolated nucleic acid inhibitor into or to cells.

[0117] Such delivery can be accomplished by generating a plasmid, viral, or other type of vector comprising an isolated nucleic acid inhibitor operably linked to a promoter/regulatory sequence which serves to introduce the nucleic acid inhibitor into cells in which the vector is introduced. Many promoter/regulatory sequences useful for the methods of the present invention are available in the art and include, but are not limited to, for example, the cytomegalovirus immediate early promoter enhancer sequence, the SV40 early promoter, as well as the Rous sarcoma virus promoter, and the like. Moreover, inducible and tissue specific expression of an isolated nucleic acid inhibitor may be accomplished by placing an isolated nucleic acid inhibitor, with or without a tag, under the control of an inducible or tissue specific promoter/regulatory sequence. Examples of tissue specific or inducible promoter/regulatory sequences which are useful for his purpose include, but are not limited to the MMTV LTR inducible promoter, and the SV40 late enhancer/promoter. In addition, promoters which are well known in the art which are induced in response to inducing agents such as metals, glucocorticoids, and the like, are also contemplated in the invention. Thus, it will be appreciated that the invention includes the use of any promoter/regulatory sequence, which is either known or unknown, and which is capable of driving expression of the desired protein operably linked thereto.

[0118] Selection of any particular plasmid vector or other vector is not a limiting factor in the invention and a wide plethora of vectors are well-known in the art. Further, it is well within the skill of the artisan to choose particular promoter/regulatory sequences and operably link those promoter/regulatory sequences to a DNA sequence encoding a desired polypeptide. Such technology is well known in the art and is described, for example, in Sambrook et al. (2001, Molecular Cloning: A Laboratory Manual, Cold Spring Harbor Laboratory, New York), and in Ausubel et al. (2001, Current Protocols in Molecular Biology, John Wiley & Sons, New York) and elsewhere herein.

### Pharmaceutical Compositions and Therapies

[0119] Administration of a nucleic acid inhibitor comprising one or more nucleic acids, antisense nucleic acids, polynucleotides, ribozymes, miRNAs or siRNAs of the invention in a method of treatment can be achieved in a number of different ways, using methods known in the art. Such methods include, but are not limited to, providing exogenous nucleic acids, antisense nucleic acids, polynucleotides, ribozymes, miRNAs or siRNAs to a subject or expressing a recombinant nucleic acid, antisense nucleic acid, polynucleotide, ribozyme, miRNA or siRNA expression cassette.

[0120] The therapeutic and prophylactic methods of the invention thus encompass the use of pharmaceutical compositions comprising a nucleic acid inhibitor, antisense nucleic acid, polynucleotide, ribozyme, miRNA or siRNA of the invention. The pharmaceutical compositions useful for practicing the invention may be administered to deliver a dose of between 1 ng/kg/day and 100 mg/kg/day. In one embodiment, the invention envisions administration of a dose which results in a concentration of the compound of the present invention between 1 μM and 10 μM in a mammal. In another embodiment, the invention envisions administration of a dose which results in a concentration of the compound of the present invention between 1 μM and 10 μM in a cell of a mammal.

[0121] Typically, dosages which may be administered in a method of the invention to an animal, preferably a human, range in amount from 0.5 μg to about 50 mg per kilogram of body weight of the animal. While the precise dosage administered will vary depending upon any number of factors, including but not limited to, the type of animal and type of disease state being treated, the age of the animal and the route of administration. Preferably, the dosage of the compound will vary from about 1 μg to about 10 mg per kilogram of body weight of the animal. More preferably, the dosage will vary from about 3 μg to about 1 mg per kilogram of body weight of the animal.

[0122] The compound may be administered to an animal as frequently as several times daily, or it may be administered less frequently, such as once a day, once a week, once every two weeks, once a month or even less frequently, such as once every several months or even once a year or less. The frequency of the dose will be readily apparent to the skilled artisan and will depend upon any number of factors, such as, but not limited to, the type and severity of the disease being treated, the type and age of the animal, etc. The formulations of the pharmaceutical compositions described herein may be prepared by any method known or hereafter developed in the art of pharmacology. In general, such preparatory methods include the step of bringing the active ingredient into association with a carrier or one or more other accessory ingredients, and then, if necessary or desirable, shaping or packaging the product into a desired single- or multi-dose unit.

[0123] Although the description of pharmaceutical compositions provided herein are principally directed to pharmaceutical compositions which are suitable for ethical administration to humans, it will be understood by the skilled artisan that such compositions are generally suitable for administration to animals of all sorts. Modification of pharmaceutical compositions suitable for administration to humans in order to render the compositions suitable for administration to various animals is well understood, and the ordinarily skilled veterinary pharmacologist can design and perform such modification with merely ordinary, if any, experimentation. Subjects to which administration of the pharmaceutical compositions of the invention is contemplated include, but are not limited to, humans and other primates, mammals including commercially relevant mammals such as non-human primates, cattle, pigs, horses, sheep, cats, and dogs.

[0124] Pharmaceutical compositions that are useful in the methods of the invention may be prepared, packaged, or sold in formulations suitable for ophthalmic, oral, rectal, vaginal, parenteral, topical, pulmonary, intranasal, buccal, or another route of administration. Other contemplated formulations include projected nanoparticles, liposomal preparations, resealed erythrocytes containing the active ingredient, and immunologically-based formulations.

[0125] A pharmaceutical composition of the invention may be prepared, packaged, or sold in bulk, as a single unit dose, or as a plurality of single unit doses. A unit dose is discrete amount of the pharmaceutical composition comprising a predetermined amount of the active ingredient. The amount of the active ingredient is generally equal to the dosage of the active ingredient which would be administered to a subject or a convenient fraction of such a dosage such as, for example, one-half or one-third of such a dosage.

[0126] The relative amounts of the active ingredient, the pharmaceutically acceptable carrier, and any additional ingredients in a pharmaceutical composition of the invention will vary, depending upon the identity, size, and condition of the subject treated and further depending upon the route by which the composition is to be administered. By way of example, the composition may comprise between 0.1% and 100% (w/w) active ingredient.

[0127] In addition to the active ingredient, a pharmaceutical composition of the invention may further comprise one or more additional pharmaceutically active agents.

[0128] Controlled- or sustained-release formulations of a pharmaceutical composition of the invention may be made using conventional technology.

[0129] Parenteral administration of a pharmaceutical composition includes any route of administration characterized by physical breaching of a tissue of a subject and administration of the pharmaceutical composition through the breach in the tissue. Parenteral administration thus includes, but is not limited to, administration of a pharmaceutical composition by injection of the composition, by application of the composition through a surgical incision, by application of the composition through a tissue-penetrating non-surgical wound, and the like. In particular, parenteral administration is contemplated to include, but is not limited to, intraocular, intravitreal, subcutaneous, intraperitoneal, intramuscular, intrasternal injection, and intratumoral.

[0130] Formulations of a pharmaceutical composition suitable for parenteral administration comprise the active ingredient combined with a pharmaceutically acceptable carrier, such as sterile water or sterile isotonic saline. Such formulations may be prepared, packaged, or sold in a form suitable for bolus administration or for continuous administration. Injectable formulations may be prepared, packaged, or sold in unit dosage form, such as in ampules or in multi-dose containers containing a preservative. Formulations for parenteral administration include, but are not limited to, suspensions, solutions, emulsions in oily or aqueous vehicles, pastes, and implantable sustained-release or biodegradable formulations. Such formulations may further comprise one or more additional ingredients including, but not limited to, suspending, stabilizing, or dispersing agents. In one embodiment of a formulation for parenteral administration, the active ingredient is provided in dry (i.e. powder or granular) form for reconstitution with a suitable vehicle (e.g. sterile pyrogen-free water) prior to parenteral administration of the reconstituted composition.

[0131] The pharmaceutical compositions may be prepared, packaged, or sold in the form of a sterile injectable aqueous or oily suspension or solution. This suspension or solution may be formulated according to the known art, and may comprise, in addition to the active ingredient, additional ingredients such as the dispersing agents, wetting agents, or suspending agents described herein. Such sterile injectable formulations may be prepared using a non-toxic parenterally-acceptable diluent or solvent, such as water or 1,3-butane diol, for example. Other acceptable diluents and solvents include, but are not limited to, Ringer's solution, isotonic sodium chloride solution, and fixed oils such as synthetic mono- or di-glycerides. Other parentally-administrable formulations which are useful include those which comprise the active ingredient in microcrystalline form, in a liposomal preparation, or as a component of a biodegradable polymer systems. Compositions for sustained release or implantation may comprise pharmaceutically acceptable polymeric or hydrophobic materials such as an emulsion, an ion exchange resin, a sparingly soluble polymer, or a sparingly soluble salt.

[0132] A pharmaceutical composition of the invention may be prepared, packaged, or sold in a formulation suitable for pulmonary administration via the buccal cavity. Such a formulation may comprise dry particles which comprise the active ingredient and which have a diameter in the range from about 0.5 to about 7 nanometers, and preferably from about 1 to about 6 nanometers. Such compositions are conveniently in the form of dry powders for administration using a device comprising a dry powder reservoir to which a stream of propellant may be directed to disperse the powder or using a self-propelling solvent/powder-dispensing container such as a device comprising the active ingredient dissolved or suspended in a low-boiling propellant in a sealed container. Preferably, such powders comprise particles wherein at least 98% of the particles by weight have a diameter greater than 0.5 nanometers and at least 95% of the particles by number have a diameter less than 7 nanometers. More preferably, at least 95% of the particles by weight have a diameter greater than 1 nanometer and at least 90% of the particles by number have a diameter less than 6 nanometers. Dry powder compositions preferably include a solid fine powder diluent such as sugar and are conveniently provided in a unit dose form.

[0133] Low boiling propellants generally include liquid propellants having a boiling point of below 65° F. at atmospheric pressure. Generally the propellant may constitute 50 to 99.9% (w/w) of the composition, and the active ingredient may constitute 0.1 to 20% (w/w) of the composition. The propellant may further comprise additional ingredients such as a liquid non-ionic or solid anionic surfactant or a solid diluent (preferably having a particle size of the same order as particles comprising the active ingredient).

[0134] Pharmaceutical compositions of the invention formulated for pulmonary delivery may also provide the active ingredient in the form of droplets of a solution or suspension. Such formulations may be prepared, packaged, or sold as aqueous or dilute alcoholic solutions or suspensions, optionally sterile, comprising the active ingredient, and may conveniently be administered using any nebulization or atomization device. Such formulations may further comprise one or more additional ingredients including, but not limited to, a flavoring agent such as saccharin sodium, a volatile oil, a buffering agent, a surface active agent, or a preservative such as methylhydroxybenzoate. The droplets provided by this route of administration preferably have an average diameter in the range from about 0.1 to about 200 nanometers.

[0135] The formulations described herein as being useful for pulmonary delivery are also useful for intranasal delivery of a pharmaceutical composition of the invention.

[0136] Another formulation suitable for intranasal administration is a coarse powder comprising the active ingredient and having an average particle from about 0.2 to 500 micrometers. Such a formulation is administered in the manner in which snuff is taken i.e. by rapid inhalation through the nasal passage from a container of the powder held close to the nares.

[0137] Formulations suitable for nasal administration may, for example, comprise from about as little as 0.1% (w/w) and as much as 100% (w/w) of the active ingredient, and may further comprise one or more of the additional ingredients described herein.

[0138] A pharmaceutical composition of the invention may be prepared, packaged, or sold in a formulation suitable for buccal administration. Such formulations may, for example, be in the form of tablets or lozenges made using conventional methods, and may, for example, 0.1 to 20% (w/w) active ingredient, the balance comprising an orally dissolvable or degradable composition and, optionally, one or more of the additional ingredients described herein. Alternately, formulations suitable for buccal administration may comprise a powder or an aerosolized or atomized solution or suspension comprising the active ingredient. Such powdered, aerosolized, or aerosolized formulations, when dispersed, preferably have an average particle or droplet size in the range from about 0.1 to about 200 nanometers, and may further comprise one or more of the additional ingredients described herein.

[0139] As used herein, “additional ingredients” include, but are not limited to, one or more of the following: excipients; surface active agents; dispersing agents; inert diluents; granulating and disintegrating agents; binding agents; lubricating agents; sweetening agents; flavoring agents; coloring agents; preservatives; physiologically degradable compositions such as gelatin; aqueous vehicles and solvents; oily vehicles and solvents; suspending agents; dispersing or wetting agents; emulsifying agents, demulcents; buffers; salts; thickening agents; fillers; emulsifying agents; antioxidants; antibiotics; antifungal agents; stabilizing agents; and pharmaceutically acceptable polymeric or hydrophobic materials. Other “additional ingredients” which may be included in the pharmaceutical compositions of the invention are known in the art and described, for example in Remington's Pharmaceutical Sciences (1985, Genaro, ed., Mack Publishing Co., Easton, Pa.), which is incorporated herein by reference.

### Kits

[0140] The invention also includes a kit comprising a nucleic acid inhibitor, or combinations thereof, of the invention and an instructional material which describes, for instance, administering the nucleic acid inhibitor, or a combinations thereof, to a subject as a therapeutic treatment or a non-treatment use as described elsewhere herein. In an embodiment, this kit further comprises a (preferably sterile) pharmaceutically acceptable carrier suitable for dissolving or suspending the therapeutic composition, comprising a nucleic acid inhibitor, or combinations thereof, of the invention, for instance, prior to administering the molecule to a subject. Optionally, the kit comprises an applicator for administering the inhibitor. A kit providing a nucleic acid, antisense nucleic acid, polynucleotide, ribozyme, miRNA or siRNA of the invention and an instructional material is also provided.

### EXPERIMENTAL EXAMPLES

[0141] The invention is now described with reference to the following Examples. These Examples are provided for the purpose of illustration only and the invention should in no way be construed as being limited to these Examples, but rather should be construed to encompass any and all variations which become evident as a result of the teaching provided herein.

[0142] Without further description, it is believed that one of ordinary skill in the art can, using the preceding description and the following illustrative examples, make and utilize the compounds of the present invention and practice the claimed methods. The following working examples therefore, specifically point out the preferred embodiments of the present invention, and are not to be construed as limiting in any way the remainder of the disclosure.

### Example 1

[0143] This example sets forth a demonstration of the efficacy of a small interfering RNA (siRNA)—based method of identifying specific cellular factors that participate in the maintenance of retroviral epigenetic silencing.

The Materials and Methods are now described.

[0144] Cells. HeLa cell populations containing silent GFP genes, as described by Katz et al., 2007, J. Virol. 81:2592-2604, were utilized. TI-C cell clones were isolated by cell sorting as described by Katz et al., 2007, J. Virol. 81:2592-2604.

[0145] Analysis of GFP expression. GFP expression was quantitated by FACScan as described previously (Greger et al., 2005, J. Virol. 79:4610-4618; Katz et al., 2007, J. Virol. 81:2592-2604; Poleshko et al., 2008, J. Virol. 82:2313-2323).

[0146] Western blot analysis. Western blotting was performed by standard methods as described previously (Greger et al., 2005, J. Virol. 79:4610-4618). Anti-HP1α (MAB3446), anti-HP1β (MAB3448), anti-HP1γ (MAB3450), and anti-GAPDH (AP124P) were purchased from Chemicon, Temecula, Calif. Anti-NF-κB p50 (ab7971), anti-Dicer (ab13502), anti-HDAC1 (ab19845), and anti-HDAC2 (ab16032) were purchased from Abcam, Cambridge, Mass. Anti-Daxx (D7810) was purchased from Sigma-Aldrich, St. Louis, Mo. Goat anti-rabbit (31462; Pierce, Rockford, Ill.) and goat anti-mouse (AP124P; Chemicon) peroxidase-conjugated second antibodies and enhanced chemiluminescence reagents (Pierce) were used according to the manufacturers' instructions.

[0147] siRNAs. All siRNA SMARTpools and single siDuplexes were purchased from Dharmacon (Lafayette, Colo.). DharmaFECT 1 transfection reagent (T-2001-02) was used according to the manufacturer's protocols. The following siRNAs were used: siCONTROL GAPDH duplex (D-001140-01), siCONTROL RISC-free siRNA #1 (D-001220-01), and siCONTROL nontargeting siRNA #1 (D-001210-01). The following siRNA SMARTpools were used: HP1αα/CBX1 (M-009716-00), HP1β/CBX3 (M-010033-00), HP1γ/CBX5 (M-004296-01), Dicer1 (M-003483-00), HDAC1 (M-003493-02), HDAC2 (M-094936-00), HDAC3 (M-003496-00), HDAC4 (M-003497-02), and Daxx (M-004420-00).

[0148] The following single siRNAs were used: NF-κB1 (D-003520-01/02/03/05), Daxx (D-004420-01/02/03/04), HDAC1 (D-003493-01/02/04/09), H3.3A (D-011684-04), H3.3B (D-012051), and HIRA (D-013610-02/04).

[0149] Quantitative RT-PCR (qRT-PCR). RNA was quantified using the Agilent 2100 BioAnalyzer in combination with an RNA 6000 Nano LabChip. RNA was reverse transcribed using the Moloney murine leukemia virus reverse transcriptase (RT) (Ambion, Austin Tex.) and a mixture of anchored oligo(dT) and random decamers. Aliquots of cDNAs were used for PCR. Real-time PCR assays were run using an ABI 7900 HT instrument. The primers and probes were designed using Primer Express version 1.5 software from Applied Biosystems and synthesized by the Fox Chase Cancer Center Fannie Rippel Biotechnology Facility. The probes were 5′-6FAM and 3′-BHQ1 labeled. PCR master mix from Eurogentec was used for PCR. Cycling conditions were 95° C. for 15 min followed by 40 (two-step) cycles (95° C. for 15 s and 60° C. for 60 s). PolR2F was used as the reference gene. The 2^{-ΔΔ}_{CT} method (C_{T}, threshold cycle) was used to calculate relative changes in expression. For each sample, the values are averages and standard deviations of data from two PCRs performed with two amounts (100 and 20 ng) of total RNA in the RT reaction. The following primers and probe sequences were used: for Daxx, 5′-AGGGCCATTAGGAAACAGCTA (forward) (SEQ ID NO: 843), 5′-AGGGTACATATCTTTTTCCCATTCTT (reverse) (SEQ ID NO: 844), and 5′-TGGAAAGGCAAAGGTCAGTGCATGA (probe) (SEQ ID NO: 845); for HDAC1, 5′-TGAGGACGAAGACGACCCT (forward) (SEQ ID NO: 846), 5′-CTCACAGGCAATTCGTTTGTC (reverse) (SEQ ID NO: 847), and 5′-CAAGCGCATCTCGATCTGCTCCTC (probe) (SEQ ID NO: 848); for HDAC2, 5′-CTTTCCTGGCACAGGAGACTT (forward) (SEQ ID NO: 849), 5′-CACATTGGAAAATTGACAGCATAGT (reverse) (SEQ ID NO: 850), and 5′-AGGGATATTGGTGCTGGAAAAGGCAA (probe) (SEQ ID NO: 851); for HDAC3, 5′-GCTCCTCACTAATGGCCTCTTC (forward) (SEQ ID NO: 852), 5′-GGTGGTTATACTGTCCGAAATGTT (reverse) (SEQ ID NO: 853), and 5′-AGCAGCGATGTCTCATATGTCCAGCA (probe) (SEQ ID NO: 854); and for HDAC4, 5′-TTGAGCGTGAGCAAGATCCT (forward) (SEQ ID NO: 855), 5′-GACGCTAGGGTCGCTGTAGAA (reverse) (SEQ ID NO: 856), and 5′-CGTGGACTGGGACGTGCACCA (probe) (SEQ ID NO: 857).

[0150] dnHP1 expression vector. The construction and use of a retroviral vector encoding a dominant negative form of HP1 (dnHP1) was described previously (HP1βΔN) (Zhang et al., 2007, Mol. Cell. Biol. 27:949-962).

[0151] Plasmids and transfection. Immediate early 1 (IE1) and IE2 expression plasmids (Nevels, et al., 2004, Proc. Natl. Acad. Sci. USA 101:17234-17239), Gam1 wild-type (wt) and mutant expression plasmids (Chiocca, et al., 2002, Curr. Biol. 12:594-598), and pp71 wt and mutant expression plasmids were utilized. Transfections were carried out using Lipofectamine or Lipofectamine 2000 (Invitrogen, Carlsbad Calif.) as described by the supplier.

[0152] Construction and transfection of an HDAC1 siRNA-resistant expression plasmid. An HDAC1 expression plasmid was purchased from Origene (Rockville, Md.). The QuikChange mutagenesis kit (Stratagene, La Jolla, Calif.) was used to introduce silent changes in the HDAC1 codons to create an siRNA-resistant site for HDAC1 siRNA 01. The oligodeoxynucleotides used for mutagenesis were:

(SEQ ID NO: 858)
5′-GGATACGGAGATCCCTAATGAGCTCCCCTACAATGACTACTTTG-3′
and
(SEQ ID NO: 859)
5′-CAAAGTAGTCATTGTAGGGGAGCTCATTAGGGATCTCCGTATCC-3′.

The wt and resistant plasmids were used to transfect HeLa TI-C cells in the presence of HDAC1 siRNA 01 by use of the Dharmacon DharmaFECT Duo transfection reagent as described by the supplier.

[0153] ChIP. Chromatin immunoprecipitation (ChIP) reactions from TI-C cells were performed using the Upstate/Millipore EZ ChIP kit. Anti-Daxx antibody was obtained from Santa Cruz (sc-7152), and the immunoglobulin G negative control antibody was provided with the EZ ChIP kit. For PCRs, 2 μl of purified DNA from precipitated chromatin was amplified by PCR with the following primers: CMV-GFP (positions −306 to +20 surrounding the transcriptional start site) (5′-CTT ATG GGA CTT TCC TAC TTG-3′ [forward] (SEQ ID NO: 860) and 5′-TCC TCG CCC TTG CTC ACC ATG-3′ [reverse] (SEQ ID NO: 861)) and β-actin coding region (positions 68 to 327) (5′-CTC ACC ATG GAT GAT GAT ATC GC-3′ [forward] (SEQ ID NO: 862) and 5′-ATT TTC TCC ATG TCG TCC CAG TTG-3′ [reverse] (SEQ ID NO: 863)). The PCR products were analyzed on 2% agarose gels. For the quantitation of PCR products, gels were stained with Syto 60 (Invitrogen) and analyzed using the Odyssey imaging system (LI-COR).

The Results of the experiments are now described.

[0154] Silent retroviruses are reactivated by HDAC1 and Daxx siRNAs. The protocol described herein utilized a previously isolated subset of HeLa cells that contain silent retroviral GFP reporter genes that can be reactivated by treatment with a variety of HDIs, including TSA (Katz et al., 2007, J. Virol. 81:2592-2604). These cells are designated TSA inducible (TI) and additional versions have been derived, which harbor silent GFP retroviral reporter genes under the control of the human cytomegalovirus (hCMV) IE (TI-C) or ASV (TI-L) long terminal repeat (LTR) (TI-L) promoters (Katz et al., 2007, J. Virol. 81:2592-2604). Such cells represented a significant fraction of the infected culture, as the ratio of GFP+ cells to TI-C cells was approximately 2:1 (Katz et al., 2007, J. Virol. 81:2592-2604; Poleshko et al., 2008, J. Virol. 82:2313-2323)

[0155] TSA has broad activity against class 1 (widely expressed) and class 2 (primarily tissue-specific) HDACs. HDAC1 and HDAC2 (class 1) were considered to be strong candidates for meditating silencing, as they were detected in complexes with ASV viral DNA in HeLa cells early after infection (Greger et al., 2005, J. Virol. 79:4610-4618). Expression of the class 2 HDAC4 is typically more restricted to specific tissues; however, HDAC4 was previously detected in HeLa cells (Greger et al., 2005, J. Virol. 79:4610-4618). Initial experiments were designed to use siRNAs to identify roles for one or more HDACs in silencing maintenance, as siRNA-mediated knockdown of HDACs might phenocopy HDI activity. TI-C cells were treated with siRNA “SMARTpools” (Dharmacon Corp.) (100 nM) comprising a mixture of four siRNAs that target single mRNAs. Initial tests included siRNAs specific for HDAC1, HDAC2, HDAC3, and HDAC4. As shown in FIG. 1A, treatment of the TI-C population with an siRNA pool that targets HDAC1 resulted in the appearance of a significant fraction of cells that expressed GFP, as measured by fluorescence-activated cell sorter (FACS) analysis. In contrast, siRNA pools that target HDAC2, HDAC3, and HDAC4 mRNA had no significant effect. As shown in the FACS profiles in FIG. 1B, treatment with the HDAC1 siRNA pool resulted in the appearance of cells with very high GFP fluorescence intensities. The HDAC2 siRNA pool consistently produced a small increase in the number of GFP-expressing cells, but the GFP intensity in this small fraction was just above the background level (FIG. 1B). Previous studies suggested a role for Daxx in the initiation of retroviral silencing in this system. Transfection of the TI-C cell population with the Daxx siRNA pool also resulted in robust reactivation of GFP (FIGS. 1A and B), although it was not as pronounced as observed with the HDAC1 siRNA (FIG. 1B).

[0156] The TI-C cells used here were previously found to oscillate between responsive and nonresponsive states in terms of reactivation by HDIs (Katz et al., 2007, J. Virol. 81:2592-2604). It is likely that this phenomenon also contributes to the incomplete reactivation observed with HDAC1 and Daxx siRNAs.

[0157] Validation and biological relevance of siRNA-mediated reactivation. To confirm the specificities of the reactivation shown in FIG. 1, target mRNA levels were measured by qRT-PCR (FIG. 2A). The results confirm that treatment with an siRNA pool that targets HDAC1 mRNA resulted in a substantial reduction in HDAC1 mRNA levels but not in Daxx mRNA levels. siRNAs directed against HDAC2, −3, and −4 mRNAs were effective at reducing the levels of their respective target mRNAs. Daxx siRNA treatment resulted in a significant reduction in Daxx mRNA, with only a negligible effect on the HDAC1 mRNA level. Western blotting confirmed that the siRNA pools produced significant reductions in the amounts of the corresponding proteins in all cases (FIG. 2B). Thus, the lack of reactivation by HDAC2, −3, and −4 siRNA pools could not be attributed to ineffectiveness of these siRNAs.

[0158] The possibility that “off-target” effects of siRNA pools might lead to GFP reactivation through the knockdown of an unintended mRNA target was also considered. As off-target effects are frequently sequence based, analysis of several single siRNAs was carried out. In these experiments, the TI-C population was treated with each of the four individual siRNAs (25 nM concentration) from the HDAC1 and Daxx pools. Three individual siRNAs from the HDAC1 pool (01, 02, and 09) produced both efficient knockdown of HDAC1 and GFP reactivation. As a final confirmation of specificity, an expression plasmid encoding an siRNA-resistant form of HDAC1 siRNA 01 was constructed, and it was demonstrated that the introduction of this plasmid could repress the GFP reporter in the presence of HDAC1 siRNA 01 (FIG. 2C). All four of the individual Daxx siRNAs produced a level of reactivation that was similar to what was seen for the pool, also eliminating the possibility of off-target effects.

[0159] To assess a direct role for Daxx in the maintenance of silencing at the retroviral loci in TI-C cells, chromatin immunoprecipitation (ChIP) was used. As shown in FIG. 2D, Daxx was detected in the hCMV IE promoter/enhanced GFP transcriptional start site region of the silent viral loci but was not detected at the active β-actin cellular locus. Taken together, the siRNA and ChIP results indicate that Daxx plays a direct role in the long-term maintenance of silencing.

[0160] Specific candidate and control siRNAs do not reactivate silent GFP retroviral reporter genes. The effects of other siRNA pools which might have the potential to produce broad effects on HDAC1-mediated silencing (NF-κB), chromatin structure (histone chaperone HIRA and histone H3.3), and microRNA processing (Dicer) were tested. For example, human Dicer1 regulates many genes via its role in microRNA processing and also by production of siRNAs that can direct heterochromatin formation. It was found that the knockdown of NF-κB or Dicer did not result in retroviral reporter gene reactivation (FIGS. 3A and C). The introduction of siRNA pools directed against the histone variants H3.3A and H3.3B or the histone chaperone protein HIRA also failed to reactivate the silent GFP reporter under these conditions (FIG. 3B).

[0161] Specifically designed negative control siRNAs (Dharmacon Corp.) that do not target cellular mRNA sequences (nontargeting) but are either able or unable to assemble into the RISC complex that mediates target mRNA degradation were also tested. The nontargeting siRNA can reveal the potential for off-target effects that are mediated through the RISC complex (designated the RISC+ control). The “RISC-free” siRNA is modified to prevent assembly into the RISC complex and serves as a control for the treatment of cells with the transfection reagent in conjunction with a functionally inert RNA payload (designated RISC− control). At 100 nM concentrations, the RISC+ control siRNA showed some low level of reactivation compared to the RISC− or GAPDH siRNA controls (FIG. 3D). As RISC-dependent off-target effects are typically more prominent at high concentrations of individual siRNAs (e.g., 100 nM), this observation gave us an opportunity to more carefully address the effects of siRNA concentration with respect to specific versus off-target effects on GFP reactivation. The standard conditions utilize siRNA pools at a 100 nM final concentration, with each of four siRNAs being present at 25 nM. Parallel titrations of the RISC+ control and the HDAC1 siRNA pool revealed that significant reactivation by the HDAC1 siRNA pool could be observed at concentrations (≧10 nM) where the RISC+ had no effect above what was seen for the transfection reagent alone (FIG. 3E). This titration also revealed that the HDAC1 siRNA pool could reactivate GFP at a low concentration (25 nM), characteristic of specific siRNA targeting. From the experiments shown in FIG. 3, it was concluded that several nonspecific controls, or siRNAs that are predicted to have broad effects on gene expression, do not promote reactivation; furthermore, a role for human Dicer1 in the maintenance of silencing in this system was not identified

[0162] In summary, the results of the experiments shown in FIGS. 1 through 3 validated the experimental design, namely, to use siRNAs to interrogate GFP-silent cells to identify factors mediating silencing. These experiments suggest that HDAC1 and Daxx have specific roles in the maintenance of retroviral silencing in this system.

[0163] Evidence for position-independent roles for HDAC1 and Daxx in retroviral reporter gene silencing. To determine if the integration sites of the retroviral DNA are determinants for the participation of specific host factors that control epigenetic silencing, a series of TI-C cell clones was examined. These clones were derived from a pool of cells in which the average GFP copy number was ca. 1 as measured by quantitative real-time PCR (Katz et al., 2007, J. Virol. 81:2592-2604; Poleshko et al., 2008, J. Virol. 82:2313-2323). As shown in FIG. 4A, treatment of each of these cell clones with TSA induced GFP reactivation, but to various degrees. Challenge with the HDAC1 siRNA pool also resulted in reactivation in all clones, and the Daxx siRNA pool produced a measurable reactivation in 7 of the 10 clones tested (FIG. 4B, clones 1, 2, 6, 7, 8, 9, and 10). As with the TI-C cell population, transfection with the HDAC1 siRNA pool phenocopied the TSA treatment (compare FIGS. 4A and B). Based on analyses of these clones, it was concluded that HDAC1 and, in most cases, Daxx are required for the maintenance of silencing at independent loci, but the integration site may modulate the extent of reactivation.

[0164] Clones 2 and 6 also showed modest levels of reactivation after treatment with HDAC2 and HDAC3 siRNA pools; however, the mean fluorescence intensities of GFP positive cells were significantly lower than that produced by the HDAC1 siRNA pool (not shown). Furthermore, clones 2 and 6 also showed exaggerated responses to the transfection reagent alone, compared to other clones. Clone 2 was also prone to spontaneous or stress-induced GFP reactivation (data not shown). These results also indicate that the integration locus can affect the reactivation properties.

[0165] HP1 plays a role in retroviral gene silencing. The three isoforms of HP1, designated α, β, and γ, have been implicated in a variety of processes, including the maintenance of epigenetic gene silencing (Grewal & Jia, 2007, Nat. Rev. Genet. 8:35-46). To investigate the possible role of these proteins in retroviral reporter gene silencing, HeLa TI-C cells were transfected with HP1α, β, and γ siRNA pools. As shown in FIG. 5A, the HP1γ siRNA pool induced significant GFP reactivation, whereas the HP1α and HP1β siRNA pools had no effect compared to what was seen for transfection agent alone. Although transfection of the HP1γ siRNA pool resulted in a smaller percentage of GFP-expressing cells than transfection of the HDAC1 siRNA pool (FIG. 5A), the GFP intensity in the activated cells was high.

[0166] The HP1β and HP1γ isoforms were found to be highly abundant in HeLa cells, and siRNA-specific knockdown of both proteins was confirmed (FIG. 5B). The amount of HP1α was very low in untransfected HeLa cells, but knockdown was confirmed using more-sensitive Western blotting conditions (FIG. 5C).

[0167] To address the possibility that residual amounts of HP1γ might account for the only limited reactivation produced by the HP1γ siRNA pool, GAPDH and HP1γ siRNA pools, the siRNAs were cotransfected in order to internally monitor the transfection efficiency as measured by GAPDH knockdown. As expected, transfection of the GAPDH siRNA pool resulted in knockdown of GAPDH and had no effect on HP1β and HP1γ levels (FIG. 5B). In GAPDH-HP1γ-cotransfected cells, residual levels of HP1γ could be detected under conditions in which GAPDH was nearly undetectable. It was concluded that either the HP1γ siRNA is pool less potent or a long-lived form of HP1γ protein persists. Thus, the limited reactivation in response to HP1γ siRNAs could be due to the presence of residual HP1γ protein.

[0168] To independently assess a role for HP1 isoforms in silencing, a dominant negative form (dnHP1) was. The dnHP1 was constructed by deleting the chromodomain from HP1β, leaving only the chromoshadow multimerization domain (FIG. 6A). The dnHP1 form was introduced into TI-C cells with a retroviral vector, followed by the selection of transduced cells by use of puromycin. A dramatic reactivation of the GFP gene was observed in a large subset of these cells (6B, right), and the GFP intensity was very high (FIG. 6B, left). Parallel puromycin selection of cells transduced with an empty vector failed to induce GFP expression (FIG. 6B, left). Based on the siRNA results (FIG. 5A), it is likely that the relevant target of inhibition by dnHP1 is HP1γ. It was therefore concluded that HP1γ contributes to the maintenance of retroviral reporter gene silencing in this system.

[0169] Virus-encoded inhibitors of HDACs and Daxx can reactivate the silent GFP retroviral reporter gene. Several viral proteins are known to bind to and inhibit HDACs. These proteins may act as countermeasures to protect viral genomes from repression by HDACs, consistent with a role for HDACs in an antiviral response. The avian adenovirus protein Gam1 has been demonstrated to inhibit human HDAC1 (Chiocca, et al., 2002, Curr. Biol. 12:594-598), while the hCMV proteins IE1 and IE2 inhibit HDAC3 (Nevels, et al., 2004, Proc. Natl. Acad. Sci. USA 101:17234-17239). As shown in FIG. 7A, transfection of an expression plasmid that encodes the Gam1 protein resulted in a dramatic reactivation of the silent GFP retroviral reporter in the TI-C cell population. A mutant plasmid that encodes a protein with diminished capacity to inhibit HDAC1 showed less of an effect. Expression of the wt and mutant Gam-1 proteins was confirmed by Western blotting. Gam1 was also expressed in TI-C cell clone 3, in which GFP was reactivated only by HDAC1 siRNA (FIG. 4B). Again, expression of Gam1, but not of the Gam1 mutant, resulted in strong retroviral reporter gene reactivation with this clone (data not shown). As Gam1 expression phenocopies the effect of HDAC1 siRNA, this experiment provides independent confirmation that inhibition of HDAC1 is sufficient for reactivation.

[0170] Expression of hCMV IE2 but not IE1 resulted in strong retroviral reporter gene reactivation in clone 3 (FIG. 7B). The expression of both proteins was confirmed by Western blotting. Both IE1 and IE2 are reported to form complexes with HDAC3 and inhibit its activity, although broader HDAC inhibitory specificities of these proteins have not been explored. Again, as the siRNA experiments identified a role for HDAC1 but not HDAC3 in silencing maintenance, these findings indicate that IE2 may inhibit HDAC1 as well as HDAC3. Further studies will be required to obtain support for this interpretation. Although Gam1, IE1, and IE2 may have diverse and complex functions beyond HDAC inhibition, the system described herein has apparently provided a means to detect their HDAC-inhibitory activity.

[0171] Several studies have identified a role for Daxx in the repression of hCMV gene expression. Furthermore, hCMV encodes a protein, pp71, that inhibits Daxx by targeting it for proteasome-mediated degradation. The fact that hCMV encodes a Daxx “countermeasure” supports a model whereby Daxx mediates an antiviral response that is overcome by pp71. Previous findings suggested a role for Daxx in the initiation of viral transcriptional repression (Greger et al., 2005, J. Virol. 79:4610-4618). The ability of Daxx siRNAs to reactivate silent retroviral DNA in long-term-passage cells implicates a role for Daxx in the maintenance of silencing. As a further test of this interpretation, TI-C cells were transfected with a plasmid encoding hCMV pp71. As shown in FIG. 7B, the transfection of plasmids encoding wt pp71, but not of two mutant forms of this protein, resulted in a robust reactivation of GFP expression, thus providing independent confirmation of a role for Daxx in the maintenance of silencing of integrated retroviral DNA in this system.

[0172] The retroviral reporter gene promoter is not the major determinant of silencing. In the experiments described above, the silent, TSA-sensitive GFP gene was under the control of the hCMV IE promoter (TI-C cells). To determine if the results that were obtained were dependent on this promoter, another cell population was tested in which the silent GFP reporter gene is driven by the native retroviral LTR promoter (TI-L cells) and for which rechallenge with HDIs also results in GFP reactivation (Katz et al., 2007, J. Virol. 81:2592-2604; Poleshko et al., 2008, J. Virol. 82:2313-2323). As shown in FIG. 8, when this cell population was treated with the collection of siRNA pools described above, only HDAC1, Daxx, and HP1γ siRNAs produced reactivation significantly above background levels. The overall detection of the GFP response is reduced compared to what was seen for the TI-C cells, owing to the weaker LTR promoter. Similar results were obtained with a third cell population, in which the silent reporter was under the control of the cellular EF1-α promoter (Katz et al., 2007, J. Virol. 81:2592-2604). From these experiments, it was concluded that the reporter gene promoter is not the major determinant in eliciting the activities of a signature constellation of factors that participate in maintenance of epigenetic silencing.

### Example 2

[0173] This example describes the development of a high throughput, siRNA-based screening assay for gene products involved in epigenetic silencing.

[0174] A multi-well assay was established in which GFP reactivation could be monitored using a 96-well FACS instrument (Guava). To assess the well-to-well reproducibility of the assay, a Z′-factor was calculated (Zhang, et al., 1999, J. Biomol. Screen 4:67-73), an indicator of the assay quality. In a 96-well plate, alternating rows of cells were treated with the negative control siRNA (GAPDH) and the positive control siRNA, HDAC1 (48 wells each). Analysis of triplicate plates produced a Z′-factor of about 0.8, indicative of a very good assay. A similar assay was also established using a fluorescence plate reader. In this embodiment, a Z′-factor of about 0.6 was obtained, which is well within the range required for high throughput screening (Zhang, et al., 1999, J. Biomol. Screen 4:67-73).

[0175] In any siRNA experiment, or siRNA screen, it is important to identify false positive or false negative results. As described in Example 1, these parameters were thoroughly considered and investigated. A false positive is defined as an off-target effect whereby an siRNA knocks down an unintended mRNA target. As off-target effects are siRNA-sequence and siRNA-concentration dependent, siRNA titrations were used and the use of independent siRNAs provide tests for specificity.

[0176] Knocking down an intended target may indirectly produce a phenotype by initiating a cascade of cellular events. Such indirect effects may, or may not, be relevant to the biological question being asked. Also, negative results with a particular siRNA could be due to ineffective knockdown of the target, or to induction of cell toxicity which precludes detection of the phenotype being measured. In this assay, it was considered that interference with GFP expression would preclude detection of GFP reactivation. As both false positive and false negative effects are siRNA sequence-dependent, the analysis of multiple siRNAs for each target is important. To address all of these issues, multiple negative control siRNAs were used, and tested two to four independent specific siRNAs for each target. Two assays to detect false negative results were also employed. One assay detects cell toxicity (Alamar blue) produced by specific siRNAs and the other assay detects interference with GFP by measuring a loss of GFP intensity in GFP-expressing cells. Lastly, unless specified, all hits in the screen could be reproduced with two independent cell populations in which the silent GFP was under control of different promoters.

[0177] An example protocol is set forth below. This protocol has been performed and tested.

siRNA Resuspension (Day 0)

[0178] 1. Prepare a 2 μM siRNA masterplate by adding 10 μl of 10 μM siRNA from siRNA stockplate to 40 μl of 1×siRNA suspension buffer. Mix by pipetting carefully up and down.

### Transfection (Day 0)

[0179] This protocol has been optimized for use with HeLa cells in a 96-well plate format. The final concentration of siRNA is 50 nM; the final transfection volume is 100 μl; the cell number is 5000 cells/well; the volume of DharmaFECT 1 (Dharmacon, Inc., Boulder Colo.) is 0.15 μl/well.
[0180] 1. Dilute 30 μl DharmaFECT 1 in 2.97 ml HBSS. Total volume of diluted DharmaFECT 1 is 3.0 ml.
[0181] 2. Dispense 15.0 μl diluted DharmaFECT 1 into each well of the duplicated reaction plate.
[0182] 3. Dispense 10.0 μl HBSS into each well of the mixing plate.
[0183] 4. Add 5.0 μl siRNA from masterplate to the mixing plate. Final volume is 15.0 μl. Mix by pipetting carefully up and down.
[0184] 5. Dispense 7.0 μl siRNA:HBSS mix to duplicated reaction plate containing DharmaFECT 1. Mix by pipetting carefully up and down. Final volume is 22 μl in each reaction plate. Incubate 20 minutes on RT.
[0185] 6. While the siRNA and DharmaFECT 1 are complexing, prepare HeLa TI cells in suspension with concentration ˜6000 cells/ml (DMEM, 10% FBS, no drugs).
[0186] 7. Dispense 80 μl of the HeLa cells suspension to reaction plates containing siRNA:DharmaFECT 1 complex. Final amount of cells is 5000 cells/well.
[0187] 8. Incubate plates at 37° C. in 5% CO2 for 48 hours.

### End of Transfection (Day 2)

[0188] 1. Change transfection media to a regular media (DMEM, 10% FBS, pen/strep).

### Measuring Amount of GFP(+) Cells (Day 4)

[0189] 1. Wash cells with 1× trypsin.
[0190] 2. Add 60 μl of 1× trypsin and incubate at 37° C. until the cells detach from plate.
[0191] 3. Add 80 μl of Opti-MEM and mix by pipetting carefully to disrupt cell conglomerates.
[0192] 4. Measure amount of GFP(+) cells on 96-well Easy-Cite Guava FACS instrument.

### Example 3

[0193] This example describes the identification of several modulators of epigenetic silencing using siRNAs directed to 189 mRNA targets, using the assay described in Example 2.

[0194] A pre-selected 189 epigenetics siRNA set was designed with targets that include a large collection of chromatin remodeling factors, histone modifying enzymes (HATs, HDACs, histone methyltransferses, histone demethylases) and other epigenetic regulators. The targets are set forth in Table 1. Additional targets are set forth in Table 2.

TABLE 1

| Entrez | | | | Exemplified | |
|---|---|---|---|---|---|
| Gene | | Refseq | | by SEQ ID | |
| ID | Symbol | Transcript | Description | NO(S): | |
| 86 | ACTL6A | NM_178042 | actin-like 6A | | |
| | | NM_177989 | | | |
| | | NM_004301 | | | |
| 546 | ATRX | NM_138270 | alpha | | |
| | | NM_000489 | thalassemia/mental | | |
| | | | retardation syndrome | | |
| | | | X-linked (RAD54 | | |
| | | | homolog, S. cerevisiae) | | |
| 648 | BMI1 | NM_005180 | BMI1 polycomb ring | | |
| | | | finger oncogene | | |
| 1105 | CHD1 | NM_001270 | chromodomain | | |
| | | | helicase DNA | | |
| | | | binding protein 1 | | |
| 1106 | CHD2 | NM_001042572 | chromodomain | | |
| | | NM_001271 | helicase DNA | | |
| | | | binding protein 2 | | |
| 1107 | CHD3 | NM_001005271 | chromodomain | | |
| | | NM_005852 | helicase DNA | | |
| | | NM_001005273 | binding protein 3 | | |
| 1108 | CHD4 | NM_001273 | chromodomain | | |
| | | | helicase DNA | | |
| | | | binding protein 4 | | |
| 1386 | ATF2 | NM_001880 | activating | | |
| | | | transcription factor 2 | | |
| 1387 | CREBBP | NM_001079846 | CREB binding | | |
| | | NM_004380 | protein (Rubinstein- | | |
| | | | Taybi syndrome) | | |
| 1786 | DNMT1 | NM_001379 | DNA (cytosine-5)- | | |
| | | | methyltransferase 1 | | |
| 1787 | TRDMT1 | NM_176083 | tRNA aspartic acid | | |
| | | NM_176081 | methyltransferase 1 | | |
| | | NM_004412 | | | |
| 1788 | DNMT3A | NM_022552 | DNA (cytosine-5-)- | 15 | 16 |
| | | NM_175630 | methyltransferase 3 | | |
| | | NM_153759 | alpha | | |
| | | NM_175629 | | | |
| 1789 | DNMT3B | NM_006892 | DNA (cytosine-5-)- | | |
| | | NM_175850 | methyltransferase 3 | | |
| | | NM_175848 | beta | | |
| | | NM_175849 | | | |
| 1911 | PHC1 | NM_004426 | polyhomeotic | | |
| | | | homolog 1 | | |
| | | | (Drosophila) | | |
| 1912 | PHC2 | NM_004427 | polyhomeotic | 19 | 20 |
| | | NM_198040 | homolog 2 | | |
| | | | (Drosophila) | | |
| 2033 | EP300 | NM_001429 | E1A binding protein | | |
| | | | p300 | | |
| 2074 | ERCC6 | NM_000124 | excision repair cross- | | |
| | | | complementing | | |
| | | | rodent repair | | |
| | | | deficiency, | | |
| | | | complementation | | |
| | | | group 6 | | |
| 2145 | EZH1 | NM_001991 | enhancer of zeste | | |
| | | | homolog 1 | | |
| | | | (Drosophila) | | |
| 2146 | EZH2 | NM_004456 | enhancer of zeste | | |
| | | NM_152998 | homolog 2 | | |
| | | | (Drosophila) | | |
| 2186 | BPTF | NM_004459 | bromodomain PHD | | |
| | | NM_182641 | finger transcription | | |
| | | | factor | | |
| 2648 | GCN5L2 | NM_021078 | GCN5 general control | | |
| | | | of amino-acid | | |
| | | | synthesis 5-like 2 | | |
| | | | (yeast) | | |
| 3065 | HDAC1 | NM_004964 | histone deacetylase 1 | 1 | 2 |
| 3066 | HDAC2 | NM_001527 | histone deacetylase 2 | | |
| 3070 | HELLS | NM_018063 | helicase, lymphoid- | | |
| | | | specific | | |
| 3146 | HMGB1 | NM_002128 | high-mobility group | | |
| | | | box 1 | | |
| 3148 | HMGB2 | NM_002129 | high-mobility group | | |
| | | | box 2 | | |
| 3149 | HMGB3 | NM_005342 | high-mobility group | | |
| | | | box 3 | | |
| 3150 | HMGN1 | NM_004965 | high-mobility group | | |
| | | | nucleosome binding | | |
| | | | domain 1 | | |
| 3151 | HMGN2 | NM_005517 | high-mobility group | | |
| | | | nucleosomal binding | | |
| | | | domain 2 | | |
| 3159 | HMGA1 | NM_145899 | high mobility group | | |
| | | NM_145904 | AT-hook 1 | | |
| | | NM_145901 | | | |
| | | NM_002131 | | | |
| | | NM_145903 | | | |
| | | NM_145902 | | | |
| | | NM_145905 | | | |
| 3276 | PRMT1 | NM_198318 | protein arginine | | |
| | | NM_198319 | methyltransferase 1 | | |
| | | NM_001536 | | | |
| 4152 | MBD1 | NM_015844 | methyl-CpG binding | 7 | 8 |
| | | NM_015847 | domain protein 1 | | |
| | | NM_002384 | | | |
| | | NM_015845 | | | |
| | | NM_015846 | | | |
| 4204 | MECP2 | NM_004992 | methyl CpG binding | | |
| | | | protein 2 (Rett | | |
| | | | syndrome) | | |
| 4261 | CIITA | NM_000246 | class II, major | | |
| | | | histocompatibility | | |
| | | | complex, | | |
| | | | transactivator | | |
| 4297 | MLL | NM_005933 | myeloid/lymphoid or | | |
| | | | mixed-lineage | | |
| | | | leukemia (trithorax | | |
| | | | homolog, Drosophila) | | |
| 4676 | NAP1L4 | NM_005969 | nucleosome assembly | | |
| | | | protein 1-like 4 | | |
| 5885 | RAD21 | NM_006265 | RAD21 homolog | 31 | 32 |
| 5928 | RBBP4 | NM_005610 | retinoblastoma | | |
| | | | binding protein 4 | | |
| 5931 | RBBP7 | NM_002893 | retinoblastoma | | |
| | | | binding protein 7 | | |
| 6015 | RING1 | NM_002931 | ring finger protein 1 | 17 | 18 |
| 6045 | RNF2 | NM_007212 | ring finger protein 2 | | |
| 6046 | BRD2 | NM_005104 | bromodomain | | |
| | | | containing 2 | | |
| 6594 | SMARCA1 | NM_003069 | SWI/SNF related, | | |
| | | | matrix associated, | | |
| | | | actin dependent | | |
| | | | regulator of | | |
| | | | chromatin, subfamily | | |
| | | | a, member 1 | | |
| 6595 | SMARCA2 | NM_139045 | SWI/SNF related, | | |
| | | NM_003070 | matrix associated, | | |
| | | | actin dependent | | |
| | | | regulator of | | |
| | | | chromatin, subfamily | | |
| | | | a, member 2 | | |
| 6596 | HLTF | NM_003071 | helicase-like | | |
| | | NM_139048 | transcription factor | | |
| 6597 | SMARCA4 | NM_003072 | SWI/SNF related, | | |
| | | | matrix associated, | | |
| | | | actin dependent | | |
| | | | regulator of | | |
| | | | chromatin, subfamily | | |
| | | | a, member 4 | | |
| 6598 | SMARCB1 | NM_003073 | SWI/SNF related, | | |
| | | NM_001007468 | matrix associated, | | |
| | | | actin dependent | | |
| | | | regulator of | | |
| | | | chromatin, subfamily | | |
| | | | b, member 1 | | |
| 6599 | SMARCC1 | NM_003074 | SWI/SNF related, | | |
| | | | matrix associated, | | |
| | | | actin dependent | | |
| | | | regulator of | | |
| | | | chromatin, subfamily | | |
| | | | c, member 1 | | |
| 6601 | SMARCC2 | NM_139067 | SWI/SNF related, | | |
| | | NM_003075 | matrix associated, | | |
| | | | actin dependent | | |
| | | | regulator of | | |
| | | | chromatin, subfamily | | |
| | | | c, member 2 | | |
| 6602 | SMARCD1 | NM_003076 | SWI/SNF related, | | |
| | | NM_139071 | matrix associated, | | |
| | | | actin dependent | | |
| | | | regulator of | | |
| | | | chromatin, subfamily | | |
| | | | d, member 1 | | |
| 6603 | SMARCD2 | NM_003077 | SWI/SNF related, | | |
| | | NM_001098426 | matrix associated, | | |
| | | | actin dependent | | |
| | | | regulator of | | |
| | | | chromatin, subfamily | | |
| | | | d, member 2 | | |
| 6749 | SSRP1 | NM_003146 | structure specific | | |
| | | | recognition protein 1 | | |
| 6839 | SUV39H1 | NM_003173 | suppressor of | | |
| | | | variegation 3-9 | | |
| | | | homolog 1 | | |
| | | | (Drosophila) | | |
| 6872 | TAF1 | NM_138923 | TAF1 RNA | | |
| | | NM_004606 | polymerase II, TATA | | |
| | | | box binding protein | | |
| | | | (TBP)-associated | | |
| | | | factor, 250 kDa | | |
| 7290 | HIRA | NM_003325 | HIR histone cell | | |
| | | | cycle regulation | | |
| | | | defective homolog A | | |
| | | | (S. cerevisiae) | | |
| 7703 | PCGF2 | NM_007144 | polycomb group ring | | |
| | | | finger 2 | | |
| 7862 | BRPF1 | NM_001003694 | bromodomain and | | |
| | | NM_004634 | PHD finger | | |
| | | | containing, 1 | | |
| 7994 | MYST3 | NM_006766 | MYST histone | | |
| | | | acetyltransferase | | |
| | | | (monocytic leukemia) 3 | | |
| 8019 | BRD3 | NM_007371 | bromodomain | | |
| | | | containing 3 | | |
| 8085 | MLL2 | NM_003482 | myeloid/lymphoid or | | |
| | | | mixed-lineage | | |
| | | | leukemia 2 | | |
| 8091 | HMGA2 | NM_003483 | high mobility group | | |
| | | NM_003484 | AT-hook 2 | | |
| 8202 | NCOA3 | NM_006534 | nuclear receptor | | |
| | | NM_181659 | coactivator 3 | | |
| 8208 | CHAF1B | NM_005441 | chromatin assembly | | |
| | | | factor 1, subunit B | | |
| | | | (p60) | | |
| 8243 | SMC1A | NM_006306 | structural | | |
| | | | maintenance of | | |
| | | | chromosomes 1A | | |
| 8289 | ARID1A | NM_006015 | AT rich interactive | | |
| | | NM_139135 | domain 1A (SWI- | | |
| | | | like) | | |
| 8438 | RAD54L | NM_003579 | RAD54-like (S. cerevisiae) | | |
| 8458 | TTF2 | NM_003594 | transcription | | |
| | | | termination factor, | | |
| | | | RNA polymerase II | | |
| 8467 | SMARCA5 | NM_003601 | SWI/SNF related, | | |
| | | | matrix associated, | | |
| | | | actin dependent | | |
| | | | regulator of | | |
| | | | chromatin, subfamily | | |
| | | | a, member 5 | | |
| 8520 | HAT1 | NM_003642 | histone | | |
| | | NM_001033085 | acetyltransferase 1 | | |
| 8535 | CBX4 | NM_003655 | chromobox homolog | | |
| | | | 4 (Pc class homolog, | | |
| | | | Drosophila) | | |
| 8648 | NCOA1 | NM_147223 | nuclear receptor | | |
| | | NM_003743 | coactivator 1 | | |
| | | NM_147233 | | | |
| 8726 | EED | NM_152991 | embryonic ectoderm | | |
| | | NM_003797 | development | | |
| 8805 | TRIM24 | NM_003852 | tripartite motif- | 23 | 24 |
| | | NM_015905 | containing 24 | | |
| 8841 | HDAC3 | NM_003883 | histone deacetylase 3 | | |
| 8850 | PCAF | NM_003884 | p300/CBP-associated | | |
| | | | factor | | |
| 8930 | MBD4 | NM_003925 | methyl-CpG binding | | |
| | | | domain protein 4 | | |
| 8932 | MBD2 | NM_015832 | methyl-CpG binding | 9 | 10 |
| | | NM_003927 | domain protein 2 | | |
| 9031 | BAZ1B | NM_032408 | bromodomain | | |
| | | | adjacent to zinc | | |
| | | | finger domain, 1B | | |
| 9044 | BTAF1 | NM_003972 | BTAF1 RNA | | |
| | | | polymerase II, B- | | |
| | | | TFIID transcription | | |
| | | | factor-associated, | | |
| | | | 170 kDa (Mot1 | | |
| | | | homolog, S. cerevisiae) | | |
| 9085 | CDY1 | NM_004680 | chromodomain | | |
| | | NM_170723 | protein, Y-linked, 1 | | |
| 9126 | SMC3 | NM_005445 | structural | | |
| | | | maintenance of | | |
| | | | chromosomes 3 | | |
| 9219 | MTA2 | NM_004739 | metastasis associated | | |
| | | | 1 family, member 2 | | |
| 9324 | HMGN3 | NM_004242 | high mobility group | | |
| | | NM_138730 | nucleosomal binding | | |
| | | | domain 3 | | |
| 9329 | GTF3C4 | NM_012204 | general transcription | | |
| | | | factor IIIC, | | |
| | | | polypeptide 4, 90 kDa | | |
| 9425 | CDYL | NM_004824 | chromodomain | | |
| | | NM_170752 | protein, Y-like | | |
| | | NM_170751 | | | |
| 9426 | CDY2A | NM_004825 | chromodomain | | |
| | | | protein, Y-linked, 2A | | |
| 9557 | CHD1L | NM_004284 | chromodomain | | |
| | | | helicase DNA | | |
| | | | binding protein 1-like | | |
| 9739 | SETD1A | NM_014712 | SET domain | | |
| | | | containing 1A | | |
| 9759 | HDAC4 | NM_006037 | histone deacetylase 4 | | |
| 9867 | PJA2 | NM_014819 | praja 2, RING-H2 | | |
| | | | motif containing | | |
| 9869 | SETDB1 | NM_012432 | SET domain, | 13 | 14 |
| | | NM_001145415 | bifurcated 1 | | |
| 10009 | ZBTB33 | NM_006777 | zinc finger and BTB | | |
| | | | domain containing 33 | | |
| 10013 | HDAC6 | NM_006044 | histone deacetylase 6 | | |
| 10014 | HDAC5 | NM_005474 | histone deacetylase 5 | | |
| | | NM_001015053 | | | |
| 10036 | CHAF1A | NM_005483 | chromatin assembly | 21 | 22 |
| | | | factor 1, subunit A | | |
| | | | (p150) | | |
| 10051 | SMC4 | NM_005496 | structural | | |
| | | NM_001002800 | maintenance of | | |
| | | | chromosomes 4 | | |
| 10155 | TRIM28 | NM_005762 | tripartite motif- | | |
| | | | containing 28 | | |
| 10336 | PCGF3 | NM_006315 | polycomb group ring | | |
| | | | finger 3 | | |
| 10419 | PRMT5 | NM_006109 | protein arginine | | |
| | | NM_001039619 | methyltransferase 5 | | |
| 10473 | HMGN4 | NM_006353 | high mobility group | | |
| | | | nucleosomal binding | | |
| | | | domain 4 | | |
| 10498 | CARM1 | NM_199141 | coactivator-associated | | |
| | | | arginine | | |
| | | | methyltransferase 1 | | |
| 10524 | HTATIP | NM_006388 | HIV-1 Tat interacting | | |
| | | NM_182710 | protein, 60 kDa | | |
| | | NM_182709 | | | |
| 10592 | SMC2 | NM_001042550 | structural | | |
| | | NM_006444 | maintenance of | | |
| | | NM_001042551 | chromosomes 2 | | |
| 10771 | ZMYND11 | NM_212479 | zinc finger, MYND | | |
| | | NM_006624 | domain containing 11 | | |
| 10847 | SRCAP | NM_006662 | Snf2-related CBP | | |
| | | | activator protein | | |
| 10902 | BRD8 | NM_006696 | bromodomain | | |
| | | NM_139199 | containing 8 | | |
| | | NM_183359 | | | |
| 10919 | EHMT2 | NM_025256 | euchromatic histone- | | |
| | | NM_006709 | lysine N- | | |
| | | | methyltransferase 2 | | |
| 10951 | CBX1 | NM_006807 | chromobox homolog | | |
| | | | 1 (HP1 beta homolog | | |
| | | | Drosophila) | | |
| 11143 | MYST2 | NM_007067 | MYST histone | | |
| | | | acetyltransferase 2 | | |
| 11176 | BAZ2A | NM_013449 | bromodomain | | |
| | | | adjacent to zinc | | |
| | | | finger domain, 2A | | |
| 11177 | BAZ1A | NM_182648 | bromodomain | | |
| | | NM_013448 | adjacent to zinc | | |
| | | | finger domain, 1A | | |
| 11335 | CBX3 | NM_007276 | chromobox homolog | | |
| | | NM_016587 | 3 (HP1 gamma | | |
| | | | homolog, Drosophila) | | |
| 22933 | SIRT2 | NM_030593 | sirtuin (silent mating | | |
| | | NM_012237 | type information | | |
| | | | regulation 2 | | |
| | | | homolog) 2 (S. cerevisiae) | | |
| 22955 | SCMH1 | NM_001031694 | sex comb on midleg | | |
| | | NM_012236 | homolog 1 | | |
| | | | (Drosophila) | | |
| 22992 | FBXL11 | NM_012308 | F-box and leucine- | 33 | 34 |
| | | | rich repeat protein 11 | | |
| 23028 | AOF2 | NM_015013 | amine oxidase (flavin | | |
| | | | containing) domain 2 | | |
| 23132 | RAD54L2 | NM_015106 | RAD54-like 2 (S. cerevisiae) | | |
| 23137 | SMC5 | NM_015110 | structural | | |
| | | | maintenance of | | |
| | | | chromosomes 5 | | |
| 23405 | DICER1 | NM_030621 | Dicer1, Dcr-1 | | |
| | | NM_177438 | homolog | | |
| | | | (Drosophila) | | |
| 23411 | SIRT1 | NM_012238 | sirtuin (silent mating | | |
| | | | type information | | |
| | | | regulation 2 | | |
| | | | homolog) 1 (S. cerevisiae) | | |
| 23466 | CBX6 | NM_014292 | chromobox homolog 6 | | |
| 23468 | CBX5 | NM_012117 | chromobox homolog | | |
| | | | 5 (HP1 alpha | | |
| | | | homolog, Drosophila) | | |
| 23476 | BRD4 | NM_058243 | bromodomain | | |
| | | NM_014299 | containing 4 | | |
| 23492 | CBX7 | NM_175709 | chromobox homolog 7 | | |
| 23512 | SUZ12 | NM_015355 | suppressor of zeste 12 | | |
| | | | homolog | | |
| | | | (Drosophila) | | |
| 23522 | MYST4 | NM_012330 | MYST histone | | |
| | | | acetyltransferase | | |
| | | | (monocytic leukemia) 4 | | |
| 23569 | PADI4 | NM_012387 | peptidyl arginine | | |
| | | | deiminase, type IV | | |
| 23613 | ZMYND8 | NM_012408 | zinc finger, MYND- | 37 | 38 |
| | | NM_183047 | type containing 8 | | |
| | | NM_183048 | | | |
| 23774 | BRD1 | NM_014577 | bromodomain | | |
| | | | containing 1 | | |
| 25788 | RAD54B | NM_012415 | RAD54 homolog B | | |
| | | | (S. cerevisiae) | | |
| 25842 | ASF1A | NM_014034 | ASF1 anti-silencing | | |
| | | | function 1 homolog A | | |
| | | | (S. cerevisiae) | | |
| 26038 | CHD5 | NM_015557 | chromodomain | | |
| | | | helicase DNA | | |
| | | | binding protein 5 | | |
| 27127 | SMC1B | NM_148674 | structural | | |
| | | | maintenance of | | |
| | | | chromosomes 1B | | |
| 27443 | CECR2 | NM_031413 | cat eye syndrome | | |
| | | | chromosome region, | | |
| | | | candidate 2 | | |
| 29028 | ATAD2 | NM_014109 | ATPase family, AAA | | |
| | | | domain containing 2 | | |
| 29117 | BRD7 | NM_013263 | bromodomain | | |
| | | | containing 7 | | |
| 29947 | DNMT3L | NM_175867 | DNA (cytosine-5-)- | | |
| | | NM_013369 | methyltransferase 3- | | |
| | | | like | | |
| 29994 | BAZ2B | NM_013450 | bromodomain | | |
| | | | adjacent to zinc | | |
| | | | finger domain, 2B | | |
| 50485 | SMARCAL1 | NM_014140 | SWI/SNF related, | | |
| | | | matrix associated, | | |
| | | | actin dependent | | |
| | | | regulator of | | |
| | | | chromatin, subfamily | | |
| | | | a-like 1 | | |
| 51111 | SUV420H1 | NM_017635 | suppressor of | | |
| | | NM_016028 | variegation 4-20 | | |
| | | | homolog 1 | | |
| | | | (Drosophila) | | |
| 51412 | ACTL6B | NM_016188 | actin-like 6B | | |
| 51564 | HDAC7A | NM_001098416 | histone deacetylase | | |
| | | NM_001098415 | 7A | | |
| | | NM_016596 | | | |
| | | NM_015401 | | | |
| 51592 | TRIM33 | NM_033020 | tripartite motif- | 25 | 26 |
| | | NM_015906 | containing 33 | | |
| 51773 | RSF1 | NM_016578 | remodeling and | | |
| | | | spacing factor 1 | | |
| 53615 | MBD3 | NM_003926 | methyl-CpG binding | 11 | 12 |
| | | | domain protein 3 | | |
| 54014 | BRWD1 | NM_001007246 | bromodomain and | | |
| | | NM_018963 | WD repeat domain | | |
| | | NM_033656 | containing 1 | | |
| 54107 | POLE3 | NM_017443 | polymerase (DNA | | |
| | | | directed), epsilon 3 | | |
| | | | (p17 subunit) | | |
| 54108 | CHRAC1 | NM_017444 | chromatin | | |
| | | | accessibility complex 1 | | |
| 54617 | INOC1 | NM_017553 | INO80 complex | | |
| | | | homolog 1 (S. cerevisiae) | | |
| 54821 | ERCC6L | NM_017669 | excision repair cross- | | |
| | | | complementing | | |
| | | | rodent repair | | |
| | | | deficiency | | |
| | | | complementation | | |
| | | | group 6-like | | |
| 55140 | ELP3 | NM_018091 | elongation protein 3 | | |
| | | | homolog (S. cerevisiae) | | |
| 55193 | PBRM1 | NM_018313 | polybromo 1 | 35 | 36 |
| | | NM_181042 | | | |
| | | NM_018165 | | | |
| 55294 | FBXW7 | NM_018315 | F-box and WD repeat | | |
| | | NM_001013415 | domain containing 7 | | |
| | | NM_033632 | | | |
| 55636 | CHD7 | NM_017780 | chromodomain | | |
| | | | helicase DNA | | |
| | | | binding protein 7 | | |
| 55723 | ASF1B | NM_018154 | ASF1 anti-silencing | | |
| | | | function 1 homolog B | | |
| | | | (S. cerevisiae) | | |
| 55777 | MBD5 | NM_018328 | methyl-CpG binding | | |
| | | | domain protein 5 | | |
| 55869 | HDAC8 | NM_018486 | histone deacetylase 8 | | |
| 55870 | ASH1L | NM_018489 | ash1 (absent, small, | | |
| | | | or homeotic)-like | | |
| | | | (Drosophila) | | |
| 56916 | SMARCAD1 | NM_020159 | SWI/SNF-related, | | |
| | | | matrix-associated | | |
| | | | actin-dependent | | |
| | | | regulator of | | |
| | | | chromatin, subfamily | | |
| | | | a, containing | | |
| | | | DEAD/H box 1 | | |
| 57332 | CBX8 | NM_020649 | chromobox homolog | | |
| | | | 8 (Pc class homolog, | | |
| | | | Drosophila) | | |
| 57634 | EP400 | NM_015409 | E1A binding protein | | |
| | | | p400 | | |
| 57659 | ZBTB4 | NM_020899 | zinc finger and BTB | | |
| | | | domain containing 4 | | |
| 57680 | CHD8 | NM_020920 | chromodomain | | |
| | | | helicase DNA | | |
| | | | binding protein 8 | | |
| 64754 | SMYD3 | NM_022743 | SET and MYND | | |
| | | | domain containing 3 | | |
| 79677 | SMC6 | NM_024624 | structural | | |
| | | | maintenance of | | |
| | | | chromosomes 6 | | |
| 79723 | SUV39H2 | NM_024670 | suppressor of | | |
| | | | variegation 3-9 | | |
| | | | homolog 2 | | |
| | | | (Drosophila) | | |
| 79813 | EHMT1 | NM_024757 | euchromatic histone- | | |
| | | | lysine N- | | |
| | | | methyltransferase 1 | | |
| 79885 | HDAC11 | NM_024827 | histone deacetylase | | |
| | | | 11 | | |
| 80012 | PHC3 | NM_024947 | polyhomeotic | | |
| | | | homolog 3 | | |
| | | | (Drosophila) | | |
| 80854 | SETD7 | NM_030648 | SET domain | | |
| | | | containing (lysine | | |
| | | | methyltransferase) 7 | | |
| 83933 | HDAC10 | NM_032019 | histone deacetylase | | |
| | | | 10 | | |
| 84108 | PCGF6 | NM_032154 | polycomb group ring | | |
| | | NM_001011663 | finger 6 | | |
| 84148 | MYST1 | NM_032188 | MYST histone | | |
| | | | acetyltransferase 1 | | |
| 84181 | CHD6 | NM_032221 | chromodomain | | |
| | | | helicase DNA | | |
| | | | binding protein 6 | | |
| 84333 | PCGF5 | NM_032373 | polycomb group ring | | |
| | | | finger 5 | | |
| 84444 | DOT1L | NM_032482 | DOT1-like, histone | | |
| | | | H3 methyltransferase | | |
| | | | (S. cerevisiae) | | |
| 84678 | FBXL10 | NM_001005366 | F-box and leucine- | | |
| | | NM_032590 | rich repeat protein 10 | | |
| 84733 | CBX2 | NM_005189 | chromobox homolog | | |
| | | NM_032647 | 2 (Pc class homolog, | | |
| | | | Drosophila) | | |
| 84759 | PCGF1 | NM_032673 | polycomb group ring | | |
| | | | finger 1 | | |
| 84787 | SUV420H2 | NM_032701 | suppressor of | 29 | 30 |
| | | | variegation 4-20 | | |
| | | | homolog 2 | | |
| | | | (Drosophila) | | |
| 85509 | MBD3L1 | NM_145208 | methyl-CpG binding | | |
| | | | domain protein 3-like 1 | | |
| 114785 | MBD6 | NM_052897 | methyl-CpG binding | | |
| | | | domain protein 6 | | |
| 124359 | CDYL2 | NM_152342 | chromodomain | | |
| | | | protein, Y-like 2 | | |
| 125997 | MBD3L2 | NM_144614 | methyl-CpG binding | | |
| | | | domain protein 3-like 2 | | |
| 127540 | HMGB4 | NM_145205 | high-mobility group | | |
| | | NM_001008728 | box 4 | | |
| 253175 | CDY1B | NM_001003894 | chromodomain | | |
| | | NM_001003895 | protein, Y-linked, 1B | | |
| 253461 | ZBTB38 | XM_001133510 | zinc finger and BTB | | |
| | | NM_001080412 | domain containing 38 | | |
| 375748 | LOC375748 | NM_001010895 | RAD26L | | |
| | | | hypothetical protein | | |
| 387893 | SETD8 | NM_020382 | SET domain | | |
| | | | containing (lysine | | |
| | | | methyltransferase) 8 | | |
| 1616 | DAXX | NM_001141969 | Homo sapiens death- | 3 | 4 |
| | | NM_001141970 | domain associated | | |
| | | NM_001350 | protein (DAXX) | | |
| 11335 | HP1.gamma. | NM_007276 | HP1 gamma homolog | 5 | 6 |
| | | NM_016587 | | | |
| 9682 | JMJD2 | NM_014663 | KDM4A lysine (K)- | 27 | 28 |
| | | | specific demethylase | | |
| | | | 4A | | |

TABLE 2

| Entrez | | | | Exemplified | |
|---|---|---|---|---|---|
| Gene | | | | by SEQ ID | |
| ID | Symbol | Refseq Transcript | Description | NO(S): | |
| 283208 | P4HA3 | NM_182904 | P4HA3 prolyl 4- | 39 | 40 |
| | | | hydroxylase, alpha | | |
| | | | polypeptide III | | |
| 5783 | PTPN13 | NM_006264 | PTPN13 protein | 41 | 42 |
| | | NM_080683 | tyrosine phosphatase, | | |
| | | NM_080684 | non-receptor type 13 | | |
| | | NM_080685 | (APO-1/CD95 (Fas)- | | |
| | | | associated | | |
| | | | phosphatase) | | |
| 2303 | FOXC2 | NM_005251 | FOXC2 forkhead box | 43 | 44 |
| | | | C2 (MFH-1, | | |
| | | | mesenchyme | | |
| | | | forkhead 1) | | |
| 56954 | NIT2 | NM_020202 | NIT2 nitrilase family, | 45 | 46 |
| | | | member 2 | | |
| 9828 | ARHGEF17 | NM_014786 | ARHGEF17 Rho | 47 | 48 |
| | | | guanine nucleotide | | |
| | | | exchange factor | | |
| | | | (GEF) 17 | | |
| 10861 | SLC26A1 | NM_022042 | SLC26A1 solute | 49 | 50 |
| | | NM_134425 | carrier family 26 | | |
| | | NM_213613 | (sulfate transporter), | | |
| | | | member 1 | | |
| 9313 | MMP20 | NM_004771 | MMP20 matrix | 51 | 52 |
| | | | metallopeptidase 20 | | |
| 1365 | CLDN3 | NM_001306 | CLDN3 claudin 3 | 53 | 54 |
| 10103 | TSPAN-1 | NM_005727 | TSPAN1 tetraspanin 1 | 55 | 56 |
| 3704 | ITPA | NM_033453 | ITPA inosine | 57 | 58 |
| | | NM_181493 | triphosphatase | | |
| | | | (nucleoside | | |
| | | | triphosphate | | |
| | | | pyrophosphatase) | | |
| | LOC400888 | XM_375955 | similar to | 59 | 60 |
| | | | immunoglobulin | | |
| | | | superfamily, member | | |
| | | | 3; immunoglobin | | |
| | | | superfamily, member 3 | | |
| 55196 | FLJ10652 | NM_018169 | C12orf35 | 61 | 62 |
| | | | chromosome 12 open | | |
| | | | reading frame 35 | | |
| 266743 | NXF | NM_178864 | NPAS4 neuronal | 63 | 64 |
| | | | PAS domain protein 4 | | |
| 4502 | MT2A | NM_005953 | MT2A | 65 | 66 |
| | | | metallothionein 2A | | |
| 3083 | HGFAC | NM_001528 | HGFAC HGF | 67 | 68 |
| | | | activator | | |
| 9970 | NR1I3 | NM_001077469 | NR1I3 nuclear | 69 | 70 |
| | | NM_001077470 | receptor subfamily 1, | | |
| | | NM_001077471 | group I, member 3 | | |
| | | NM_001077472 | | | |
| | | NM_001077473 | | | |
| | | NM_001077474 | | | |
| | | NM_001077475 | | | |
| | | NM_001077476 | | | |
| | | NM_001077477 | | | |
| | | NM_001077478 | | | |
| | | NM_001077479 | | | |
| | | NM_001077480 | | | |
| | | NM_001077481 | | | |
| | | NM_001077482 | | | |
| | | NM_005122 | | | |
| 10647 | SCGB1D2 | NM_006551 | SCGB1D2 | 71 | 72 |
| | | | secretoglobin, family | | |
| | | | 1D, member 2 | | |
| 6665 | SOX15 | NM_006942 | SOX15 SRY (sex | 73 | 74 |
| | | | determining region | | |
| | | | Y)-box 15 | | |
| 57408 | HT017 | NM_020678 | LRTM1 leucine-rich | 75 | 76 |
| | | | repeats and | | |
| | | | transmembrane | | |
| | | | domains 1 | | |
| 10982 | MAPRE2 | NM_001143826 | MAPRE2 | 77 | 78 |
| | | NM_001143827 | microtubule- | | |
| | | NM_014268 | associated protein, | | |
| | | | RP/EB family, | | |
| | | | member 2 | | |
| 7329 | UBE2I | NM_003345 | UBE2I ubiquitin- | 79 | 80 |
| | | NM_194259 | conjugating enzyme | | |
| | | NM_194260 | E2I | | |
| | | NM_194261 | | | |
| 55729 | ATF7IP | NM_018179 | ATF7IP activating | 81 | 82 |
| | | | transcription factor 7 | | |
| | | | interacting protein | | |
| 4353 | MPO | NM_000250 | MPO | 83 | 84 |
| | | | myeloperoxidase | | |
| 2618 | GART | NM_000819 | GART | 85 | 86 |
| | | NM_001136005 | phosphoribosylglycin | | |
| | | NM_001136006 | amide | | |
| | | NM_175085 | formyltransferase, | | |
| | | | phosphoribosylglycin | | |
| | | | amide synthetase, | | |
| | | | phosphoribosylamino | | |
| | | | imidazole synthetase | | |
| 9265 | PSCD3 | NM_004227 | CYTH3 cytohesin 3 | 87 | 88 |
| 5927 | JARID1A | NM_001042603 | KDM5A lysine (K)- | 89 | 90 |
| | | NM_005056 | specific demethylase | | |
| | | | 5A | | |
| 4331 | MNAT1 | NM_002431 | MNAT1 menage a | 91 | 92 |
| | | | trois homolog 1, | | |
| | | | cyclin H assembly | | |
| | | | factor | | |
| 5825 | ABCD3 | NM_001122674 | ABCD3 ATP-binding | 93 | 94 |
| | | NM_002858 | cassette, sub-family | | |
| | | | D (ALD), member 3 | | |
| 114825 | KIAA1935 | NM_001130864 | PWWP2A PWWP | 95 | 96 |
| | | NM_052927 | domain containing | | |
| | | | 2A | | |
| 8745 | ADAM23 | NM_003812 | ADAM23 ADAM | 97 | 98 |
| | | | metallopeptidase | | |
| | | | domain 23 | | |
| 283694 | OR4N4 | NM_001005241 | OR4N4 olfactory | 99 | 100 |
| | | | receptor, family 4, | | |
| | | | subfamily N, member 4 | | |
| 7539 | ZFP37 | NM_003408 | ZFP37 zinc finger | 101 | 102 |
| | | | protein 37 homolog | | |
| 2944 | GSTM1 | NM_000561 | GSTM1 glutathione | 103 | 104 |
| | | NM_146421 | S-transferase mu 1 | | |
| 10808 | HSPH1 | NM_006644 | HSPH1 heat shock | 105 | 106 |
| | | | 105 kDa/110 kDa | | |
| | | | protein 1 | | |
| 127670 | HE9 | NM_172000 | TEDDM1 | 107 | 108 |
| | | | transmembrane | | |
| | | | epididymal protein 1 | | |
| 4258 | MGST2 | NM_002413 | MGST2 microsomal | 109 | 110 |
| | | | glutathione S- | | |
| | | | transferase 2 | | |
| 6310 | SCA1 | NM_000332 | ATXN1 ataxin 1 | 111 | 112 |
| | | NM_001128164 | | | |
| 5810 | RAD1 | NM_002853 | RAD1 homolog | 113 | 114 |
| | | NR_026591 | | | |
| 126789 | FLJ90811 | NM_153339 | PUSL1 | 115 | 116 |
| | | | pseudouridylate | | |
| | | | synthase-like 1 | | |
| 23647 | ARFIP2 | NM_012402 | ARFIP2 ADP- | 117 | 118 |
| | | | ribosylation factor | | |
| | | | interacting protein 2 | | |
| 4222 | MEOX1 | NM_001040002 | MEOX1 | 119 | 120 |
| | | NM_004527 | mesenchyme | | |
| | | NM_013999 | homeobox 1 | | |
| 387742 | LOC387742 | NM_001014374 | FAM99A family with | 121 | 122 |
| | | | sequence similarity | | |
| | | | 99, member A | | |
| 3640 | INSL3 | NM_005543 | INSL3 insulin-like 3 | 123 | 124 |
| | | | (Leydig cell) | | |
| 308 | ANXA5 | NM_001154 | annexin A5 | 125 | 126 |
| 6121 | RPE65 | NM_000329 | RPE65 retinal | 127 | 128 |
| | | | pigment epithelium- | | |
| | | | specific protein | | |
| 182 | JAG1 | NM_000214 | Jagged 1 (Alagille | 129 | 130 |
| | | | syndrome) | | |
| 26993 | AKAP8L | NM_014371 | AKAP8L A kinase | 131 | 132 |
| | | | (PRKA) anchor | | |
| | | | protein 8-like | | |
| 10344 | CCL26 | NM_006072 | CCL26 chemokine | 133 | 134 |
| | | | (C-C motif) ligand 26 | | |
| 9651 | PLCL4 | NM_014638 | PLCH2 | 135 | 136 |
| | | | phospholipase C, eta 2 | | |
| 84258 | SYT3 | NM_032298 | SYT3 synaptotagmin | 137 | 138 |
| | | | III | | |
| 91147 | MGC26979 | NM_001142301 | TMEM67 | 139 | 140 |
| | | NM_153704 | transmembrane | | |
| | | | protein 67 | | |
| 727756 | LOC197049 | XM_001125679 | LOC727756 | 141 | 142 |
| 401860 | LOC401860 | XM_377445 | similar to double | 143 | 144 |
| | | | homeobox 4c | | |
| 29850 | TRPM5 | NM_014555 | TRPM5 transient | 145 | 146 |
| | | | receptor potential | | |
| | | | cation channel, | | |
| | | | subfamily M, | | |
| | | | member 5 | | |
| 83740 | H2AFB | NM_080720 | H2A histone family, | 147 | 148 |
| | | | member B3 | | |
| 6009 | RHEB | NM_005614 | Ras homolog | 149 | 150 |
| | | | enriched in brain | | |
| 439938 | FLJ37940 | NM_178534 | LOC439938 | 151 | 152 |
| 10320 | ZNFN1A1 | NM_006060 | IKZF1 IKAROS | 153 | 154 |
| | | | family zinc finger 1 | | |
| | | | (Ikaros) | | |
| 7399 | USH2A | NM_007123 | Usher syndrome 2A | 155 | 156 |
| | | NM_206933 | (autosomal recessive, | | |
| | | | mild) | | |
| 9915 | ARNT2 | NM_014862 | Aryl-hydrocarbon | 157 | 158 |
| | | | receptor nuclear | | |
| | | | translocator 2 | | |
| 55080 | TAPBPL | NM_018009 | TAP binding protein- | 159 | 160 |
| | | | like | | |
| 5774 | PTPN3 | NM_001145368 | Protein tyrosine | 161 | 162 |
| | | NM_001145369 | phosphatase, non- | | |
| | | NM_001145370 | receptor type 3 | | |
| | | NM_001145371 | | | |
| | | NM_001145372 | | | |
| | | NM_002829 | | | |
| 608 | TNFRSF17 | NM_001192 | Tumor necrosis factor | 163 | 164 |
| | | | receptor superfamily, | | |
| | | | member 17 | | |
| 10054 | UBA2 | NM_005499 | Ubiquitin-like | 165 | 166 |
| | | | modifier activating | | |
| | | | enzyme 2 | | |
| 83872 | FIBL-6 | NM_031935 | HMCN1 hemicentin 1 | 167 | 168 |
| 23469 | PHF3 | NM_015153 | PHD finger protein 3 | 169 | 170 |
| 66004 | LYNX1 | NM_023946 | Ly6/neurotoxin 1 | 171 | 172 |
| | | NM_177457 | | | |
| | | NM_177458 | | | |
| | | NM_177476 | | | |
| | | NM_177477 | | | |
| 79893 | ZNF403 | NM_024835 | GGNBP2 | 173 | 174 |
| | | | gametogenetin | | |
| | | | binding protein 2 | | |
| 5009 | OTC | NM_000531 | Ornithine | 175 | 176 |
| | | | carbamoyltransferase | | |
| | LOC56270 | CR456770 | Homo sapiens full | 177 | 178 |
| | | | open reading frame | | |
| | | | cDNA clone | | |
| | | | RZPDo834E014D for | | |
| | | | gene LOC56270, | | |
| | | | hypothetical protein | | |
| | | | 628 | | |
| 5051 | PAFAH2 | NM_000437 | Platelet-activating | 179 | 180 |
| | | | factor | | |
| | | | acetylhydrolase 2 | | |
| 282973 | C10ORF39 | NM_001105521 | JAKMIP3 janus | 181 | 182 |
| | | | kinase and | | |
| | | | microtubule | | |
| | | | interacting protein 3 | | |
| 159119 | HSFY2 | NM_001001877 | Heat shock | 183 | 184 |
| | | NM_153716 | transcription factor, | | |
| | | | Y linked 2 | | |
| 604 | BCL6 | NM_001130845 | B-cell | 185 | 186 |
| | | NM_001134738 | CLL/lymphoma 6 | | |
| | | NM_001706 | | | |
| 57026 | PDXP | NM_020315 | Pyridoxal | 187 | 188 |
| | | | (pyridoxine, vitamin | | |
| | | | B6) phosphatase | | |
| 7044 | EBAF | NM_003240 | LEFTY2 left-right | 189 | 190 |
| | | | determination factor 2 | | |
| 902 | CCNH | NM_001239 | Cyclin H | 191 | 192 |
| | LOC388726 | XM_371335 | Homo sapiens similar | 193 | 194 |
| | | | to osteotesticular | | |
| | | | protein tyrosine | | |
| | | | phosphatase | | |
| 5624 | PC | NM_000312 | PROC protein C | 195 | 196 |
| | | | (inactivator of | | |
| | | | coagulation factors | | |
| | | | Va and VIIIa) | | |
| 4857 | NOVA1 | NM_002515 | Neuro-oncological | 197 | 198 |
| | | NM_006489 | ventral antigen 1 | | |
| | | NM_006491 | | | |
| 4277 | MICB | NM_005931 | MHC class I | 199 | 200 |
| | | | polypeptide-related | | |
| | | | sequence B | | |
| 6923 | TCEB2 | NM_007108 | Transcription | 201 | 202 |
| | | NM_207013 | elongation factor B | | |
| | | | (SIII), polypeptide 2 | | |
| | | | (18 kDa, elongin B) | | |
| 91801 | LOC91801 | NM_138775 | ALKBH8 alkB, | 203 | 204 |
| | | | alkylation repair | | |
| | | | homolog 8 | | |
| 1047 | CLGN | NM_001130675 | Calmegin | 205 | 206 |
| | | NM_004362 | | | |
| 3638 | INSIG1 | NM_005542 | Insulin induced gene 1 | 207 | 208 |
| | | NM_198336 | | | |
| | | NM_198337 | | | |
| 3790 | KCNS3 | NM_002252 | Potassium voltage- | 209 | 210 |
| | | | gated channel, | | |
| | | | delayed-rectifier, | | |
| | | | subfamily S, member 3 | | |
| 1979 | EIF4EBP2 | NM_004096 | Eukaryotic | 211 | 212 |
| | | | translation initiation | | |
| | | | factor 4E binding | | |
| | | | protein 2 | | |
| 136259 | KLF14 | NM_138693 | Kruppel-like factor | 213 | 214 |
| | | | 14 | | |
| 284904 | SEC14L4 | NM_174977 | SEC14-like 4 | 215 | 216 |
| 388512 | FLJ45910 | NM_207390 | CLEC17A C-type | 217 | 218 |
| | | | lectin domain family | | |
| | | | 17, member A | | |
| 55867 | SLC22A11 | NM_018484 | Solute carrier family | 219 | 220 |
| | | | 22 (organic | | |
| | | | anion/urate | | |
| | | | transporter), member | | |
| | | | 11 | | |
| 3655 | ITGA6 | NM_000210 | Integrin, alpha 6 | 221 | 222 |
| | | NM_001079818 | | | |
| 388467 | LOC388467 | XM_373775.1 | LOC388467 | 223 | 224 |
| | | | hypothetical | | |
| 25855 | BRMS1 | NM_001024957 | Breast cancer | 225 | 226 |
| | | NM_015399 | metastasis suppressor 1 | | |
| 919 | CD3Z | NM_000734 | CD247 molecule | 227 | 228 |
| | | NM_198053 | | | |
| 2220 | FCN2 | NM_004108 | Ficolin | 229 | 230 |
| | | NM_015837 | (collagen/fibrinogen | | |
| | | | domain containing | | |
| | | | lectin) 2 (hucolin) | | |
| 7511 | XPNPEP1 | NM_020383 | X-prolyl | 231 | 232 |
| | | | aminopeptidase | | |
| | | | (aminopeptidase P) 1, | | |
| | | | soluble | | |
| 84103 | DKFZP434G072 | NM_032149 | Chromosome 4 open | 233 | 234 |
| | | | reading frame 17 | | |
| 27302 | BMP10 | NM_014482 | Bone morphogenetic | 235 | 236 |
| | | | protein 10 | | |
| 9256 | BZRAP1 | NM_004758 | Benzodiazapine | 237 | 238 |
| | | NM_024418 | receptor (peripheral) | | |
| | | | associated protein 1 | | |
| 84836 | MGC15429 | NM_001146314 | Abhydrolase domain | 239 | 240 |
| | | NM_032750 | containing 14B | | |
| 729 | C6 | NM_000065 | Complement | 241 | 242 |
| | | NM_001115131 | component 6 | | |
| 503694 | DEFB108 | XM_001720423 | Defensin, beta 108, | 243 | 244 |
| | | | pseudogene 1 | | |
| 400948 | LOC400948 | XM_376043 | Similar to CG33774- | 245 | 246 |
| | | | PA | | |
| 255027 | FLJ39599 | NM_001128423 | MPV17 | 247 | 248 |
| | | NM_173803 | mitochondrial | | |
| | | | membrane protein- | | |
| | | | like | | |
| 29058 | C20ORF30 | NM_001009923 | C20ORF30 | 249 | 250 |
| | | NM_001009924 | | | |
| 405 | ARNT | NM_001668 | Aryl hydrocarbon | 251 | 252 |
| | | NM_178426 | receptor nuclear | | |
| | | NM_178427 | translocator | | |
| 196051 | PPAPDC1 | NM_001030059 | Phosphatidic acid | 253 | 254 |
| | | | phosphatase type 2 | | |
| | | | domain containing | | |
| | | | 1A | | |
| 8742 | TNFSF12 | NM_003809 | Tumor necrosis factor | 255 | 256 |
| | | | (ligand) superfamily, | | |
| | | | member 12 | | |
| 6385 | SDC4 | NM_002999 | Syndecan 4 | 257 | 258 |
| 54766 | BTG4 | NM_017589 | B-cell translocation | 259 | 260 |
| | | | gene 4 | | |
| 23157 | SEPT6 | NM_015129 | Septin 6 | 261 | 262 |
| | | NM_145799 | | | |
| | | NM_145800 | | | |
| | | NM_145802 | | | |
| 27177 | IL1F8 | NM_014438 | interleukin 1 family, | 263 | 264 |
| | | | member 8 | | |
| 3586 | IL10 | NM_000572 | interleukin 10 | 265 | 266 |
| 9381 | OTOF | NM_194248 | otoferlin | 267 | 268 |
| 10121 | ACTR1A | NM_005736 | actin-related protein 1 | 269 | 270 |
| | | | homolog A | | |
| 7620 | ZNF69 | NM_021915 | zinc finger protein 69 | 271 | 272 |
| 55605 | KIF21A | NM_017641 | kinesin family | 273 | 274 |
| | | | member 21A | | |
| 3587 | IL10RA | NM_001558 | interleukin 10 | 275 | 276 |
| | | | receptor, alpha | | |
| 2108 | ETFA | NM_000126 | electron-transfer- | 277 | 278 |
| | | NM_001127716 | flavoprotein, alpha | | |
| | | | polypeptide | | |
| 27430 | MAT2B | NM_013283 | methionine | 279 | 280 |
| | | NM_1827 | adenosyltransferase II | | |
| 78994 | MGC3121 | NM_024031 | proline rich 14 (aka | 281 | 282 |
| | | | MGC3121) | | |
| 51719 | MO25 | NM_001130849 | Aka calcium binding | 283 | 284 |
| | | NM_001130850 | protein 39 | | |
| | | NM_016289 | | | |
| 8412 | BCAR3 | NM_003567 | breast cancer anti- | 285 | 286 |
| | | | estrogen resistance 3 | | |
| 402 | ARL2 | NM_001667 | ADP-ribosylation | 287 | 288 |
| | | | factor-like 2 | | |
| 79155 | TNIP2 | NM_024309 | TNFAIP3 interacting | 289 | 290 |
| | | | protein 2 | | |
| 904 | CCNT1 | NM_001240 | cyclin T1 | 291 | 292 |
| 3560 | IL2RB | NM_000878 | interleukin 2 | 293 | 294 |
| | | | receptor, beta | | |
| 8655 | DNCL1 | NM_003746 | Aka: dynein, light | 295 | 296 |
| | | NM_001037495 | chain, LC8-type 1 | | |
| | | NM_001037494 | | | |
| 3681 | ITGAD | NM_005353 | integrin, alpha D | 297 | 298 |
| 9564 | BCAR1 | NM_014567 | breast cancer anti- | 299 | 300 |
| | | | estrogen resistance 1 | | |
| 3675 | ITGA3 | NM_005501 | integrin, alpha 3 | 301 | 302 |
| | | NM_002204 | (antigen CD49C, | | |
| | | | alpha 3 subunit of | | |
| | | | VLA-3 receptor) | | |
| 53938 | PPIL3 | NM_131916 | peptidylprolyl | 303 | 304 |
| | | NM_032472 | isomerase | | |
| | | NM_130906 | (cyclophilin)-like 3 | | |
| 55632 | KIAA1333 | NM_017769 | AKA: G2/M-phase | 305 | 306 |
| | | | specific E3 ubiquitin | | |
| | | | ligase | | |
| 1175 | AP2S1 | NM_004069 | adaptor-related | 307 | 308 |
| | | NM_021575 | protein complex 2, | | |
| | | | sigma 1 subunit | | |
| 10252 | SPRY1 | NM_005841 | sprouty homolog 1, | 309 | 310 |
| | | NM_199327 | antagonist of FGF | | |
| | | | signaling | | |
| | | | (Drosophila) | | |
| 64344 | HIF3A | NM_022462 | hypoxia inducible | 311 | 312 |
| | | NM_152794 | factor 3, alpha | | |
| | | NM_152795 | subunit | | |
| 53371 | NUP54 | NM_017426 | nucleoporin 54 kDa | 313 | 314 |
| 23765 | IL17R | NM_014339 | AKA: interleukin 17 | 315 | 316 |
| | | | receptor A | | |
| 79843 | FLJ22746 | NM_001122779 | AKA: family with | 317 | 318 |
| | | NM_024785 | sequence similarity | | |
| | | | 124B | | |
| 2701 | GJA4 | NM_002060 | gap junction protein, | 319 | 320 |
| | | | alpha 4, 37 kDa | | |
| 6773 | STAT2 | NM_005419 | signal transducer and | 321 | 322 |
| | | | activator of | | |
| | | | transcription 2 | | |
| 7469 | WHSC2 | NM_005663 | Wolf-Hirschhorn | 323 | 324 |
| | | | syndrome candidate 2 | | |
| 23456 | ABCB10 | NM_012089 | ATP-binding | 325 | 326 |
| | | | cassette, sub-family | | |
| | | | B (MDR/TAP), | | |
| | | | member 10 | | |
| 54921 | DERPC | NM_001039690 | Aka: chromosome | 327 | 328 |
| | | NM_001040144 | transmission fidelity | | |
| | | NM_001040146 | factor 8 homolog | | |
| 9053 | MAP7 | NM_003980 | microtubule- | 329 | 330 |
| | | | associated protein 7 | | |
| 689 | BTF3 | NM_001037637 | basic transcription | 331 | 332 |
| | | NM_001207 | factor 3 | | |
| 25766 | HYPC | NM_001031698 | PRP40 pre-mRNA | 333 | 334 |
| | | NM_012272 | processing factor 40 | | |
| | | | homolog B | | |
| 4607 | MYBPC3 | NM_000256 | myosin binding | 335 | 336 |
| | | | protein C | | |
| 53373 | TPCN1 | NM_001143819 | two pore segment | 337 | 338 |
| | | NM_017901 | channel 1 | | |
| 27287 | VENTX2 | NM_014468 | Aka: VENT | 339 | 340 |
| | | | homeobox homolog | | |
| | | | (Xenopus laevis) | | |
| 114795 | KIAA1786 | NM_052907 | Aka: TMEM132B | 341 | 342 |
| | | | transmembrane | | |
| | | | protein 132B | | |
| 64077 | LHPP | NM_022126 | phospholysine | 343 | 344 |
| | | | phosphohistidine | | |
| | | | inorganic | | |
| | | | pyrophosphate | | |
| | | | phosphatase | | |
| 439935 | MGC24125 | XR_000543 | hypothetical protein | 345 | 346 |
| | | XR_000648 | MGC24125 | | |
| 6018 | RLF | NM_012421 | rearranged L-myc | 347 | 348 |
| | | | fusion | | |
| 4507 | MTAP | NM_002451 | methylthioadenosine | 349 | 350 |
| | | | phosphorylase | | |
| 81488 | GRINL1A | NM_001018102 | glutamate receptor, | 351 | 352 |
| | | NM_015532 | ionotropic, N-methyl | | |
| | | | D-aspartate-like 1A | | |
| 7298 | TYMS | NM_001071 | thymidylate | 353 | 354 |
| | | | synthetase | | |
| 132160 | FLJ32332 | NM_001122870 | Aka: protein | 355 | 356 |
| | | NM_144641 | phosphatase 1M | | |
| | | | (PP2C domain | | |
| | | | containing) | | |
| 125919 | ZNF543 | NM_213598 | zinc finger protein | 357 | 358 |
| | | | 543 | | |
| 3664 | IRF6 | NM_006147 | interferon regulatory | 359 | 360 |
| | | | factor 6 | | |
| 400475 | LOC400475 | XM_378553.2 | hypothetical | 361 | 362 |
| | | | LOC400475 | | |
| 285676 | ZNF454 | NM_182594 | zinc finger protein | 363 | 364 |
| | | | 454 | | |
| 338872 | MGC48915 | NM_178540 | AKA: C1q and tumor | 365 | 366 |
| | | | necrosis factor related | | |
| | | | protein 9 | | |
| 9708 | PCDHGA8 | NM_014004 | protocadherin gamma | 367 | 368 |
| | | NM_032088 | subfamily A, 8 | | |
| 146325 | LOC146325 | NM_145270 | C16orf11 | 369 | 370 |
| | | | chromosome 16 open | | |
| | | | reading frame 11 | | |
| 10806 | SDCCAG8 | NM_006642 | serologically defined | 371 | 372 |
| | | | colon cancer antigen 8 | | |
| 140767 | VMP | NM_080723 | AKA: neurensin 1 | 373 | 374 |
| 10801 | MSF | NM_001113491 | Akia: SEPT9 septin 9 | 375 | 376 |
| | | NM_001113492 | | | |
| | | NM_001113493 | | | |
| | | NM_001113494 | | | |
| | | NM_001113495 | | | |
| | | NM_001113496 | | | |
| | | NM_006640 | | | |
| 83729 | INHBE | NM_031479 | inhibin, beta E | 377 | 378 |
| 11278 | KLF12 | NM_007249 | Kruppel-like factor | 379 | 380 |
| | | | 12 | | |
| 403314 | MGC26594 | NM_203454 | AKA: apolipoprotein | 381 | 382 |
| | | | B mRNA editing | | |
| | | | enzyme, catalytic | | |
| | | | polypeptide-like 4 | | |
| | | | (putative) | | |
| 285367 | MGC29784 | NM_001142547 | AKA: RNA | 383 | 384 |
| | | NM_173659 | pseudouridylate | | |
| | | | synthase domain | | |
| | | | containing 3 | | |
| 83463 | MXD3 | NM_001142935 | MAX dimerization | 385 | 386 |
| | | NM_031300 | protein 3 | | |
| 53981 | CPSF2 | NM_017437 | cleavage and | 387 | 388 |
| | | | polyadenylation | | |
| | | | specific factor 2, | | |
| | | | 100 kDa | | |
| 5981 | RFC1 | NM_002913 | replication factor C | 389 | 390 |
| | | | (activator 1) 1, | | |
| | | | 145 kDa | | |
| 322 | APBB1 | NM_001164 | amyloid beta (A4) | 391 | 392 |
| | | NM_145689 | precursor protein- | | |
| | | | binding, family B, | | |
| | | | member 1 (Fe65) | | |
| 126353 | C19ORF21 | NM_173481 | chromosome 19 open | 393 | 394 |
| | | | reading frame 21 | | |
| 9771 | RAPGEF5 | NM_012294 | Rap guanine | 395 | 396 |
| | | | nucleotide exchange | | |
| | | | factor (GEF) 5 | | |
| 10398 | MYL9 | NM_006097 | myosin, light chain 9, | 397 | 398 |
| | | NM_181526 | regulatory | | |
| 10846 | PDE10A | NM_001130690 | phosphodiesterase | 399 | 400 |
| | | NM_006661 | 10A | | |
| 26509 | FER1L3 | NM_013451 | AKA: myoferlin | 401 | 402 |
| | | NM_133337 | | | |
| 4301 | MLLT4 | NM_001040000 | myeloid/lymphoid or | 403 | 404 |
| | | NM_001040001 | mixed-lineage | | |
| | | NM_005936 | leukemia (trithorax | | |
| | | | homolog, | | |
| | | | Drosophila); | | |
| | | | translocated to, 4 | | |
| 10055 | SAE1 | NM_001145713 | SUMO1 activating | 405 | 406 |
| | | NM_001145714 | enzyme subunit 1 | | |
| | | NM_005500 | | | |
| 5008 | OSM | NM_020530 | oncostatin M | 407 | 408 |
| 166647 | GPR125 | NM_145290 | G protein-coupled | 409 | 410 |
| | | | receptor 125 | | |
| 84720 | PIGO | NM_032634 | phosphatidylinositol | 411 | 412 |
| | | NM_152850 | glycan anchor | | |
| | | | biosynthesis, class O | | |
| 11318 | ADMR | NM_007264 | Aka: G protein- | 413 | 414 |
| | | | coupled receptor 182 | | |
| 203197 | C9ORF91 | NM_153045 | chromosome 9 open | 415 | 416 |
| | | | reading frame 91 | | |
| 390079 | LOC390079 | NM_001005168 | OR52E8 olfactory | 417 | 418 |
| | | | receptor, family 52, | | |
| | | | subfamily E, member | | |
| 11272 | PRR4 | NM_001098538 | proline rich 4 | 419 | 420 |
| | | NM_007244 | (lacrimal) | | |
| 390031 | LOC390031 | XM_372343 | SSU72 RNA | 421 | 422 |
| | | XM_939626 | polymerase II CTD | | |
| | | XM_001718915 | phosphatase homolog | | |
| | | | pseudogene | | |
| 4504 | MT3 | NM_005954 | metallothionein 3 | 423 | 424 |
| 26747 | NUFIP1 | NM_012345 | nuclear fragile X | 425 | 426 |
| | | | mental retardation | | |
| | | | protein interacting | | |
| | | | protein 1 | | |
| 79088 | ZNF426 | NM_024106 | zinc finger protein | 427 | 428 |
| | | | 426 | | |
| 6329 | SCN4A | NM_000334 | sodium channel, | 429 | 430 |
| | | | voltage-gated, type | | |
| | | | IV, alpha subunit | | |
| 200197 | FLJ23703 | NM_182534 | chromosome 1 open | 431 | 432 |
| | | | reading frame 126 | | |
| 2001 | ELF5 | NM_001422 | E74-like factor 5 (ets | 433 | 434 |
| | | NM_198381 | domain transcription | | |
| | | | factor) | | |
| 540 | ATP7B | NM_000053 | ATPase, Cu++ | 435 | 436 |
| | | NM_001005918 | transporting, beta | | |
| | | | polypeptide | | |
| 93081 | LOC93081 | NM_138779 | Chromosome 13 open | 437 | 438 |
| | | | reading frame 27 | | |
| 114803 | KIAA1915 | NM_001085487 | Myb-like, SWIRM | 439 | 440 |
| | | | and MPN domains 1 | | |
| 5407 | PNLIPRP1 | NM_006229 | Pancreatic lipase- | 441 | 442 |
| | | | related protein 1 | | |
| 26063 | DECR2 | NM_020664 | 2,4-dienoyl CoA | 443 | 444 |
| | | | reductase 2, | | |
| | | | peroxisomal | | |
| 26261 | FBXO24 | NM_012172 | F-box protein 24 | 445 | 446 |
| | | NM_033506 | | | |
| 84450 | ZNF512 | NM_032434 | Zinc finger protein | 447 | 448 |
| | | | 512 | | |
| 93624 | MGC21874 | NM_152293 | Transcriptional | 449 | 450 |
| | | | adaptor 2 (ADA2 | | |
| | | | homolog, yeast)-beta | | |
| 5817 | PVR | NM_001135768 | Poliovirus receptor | 451 | 452 |
| | | NM_001135769 | | | |
| | | NM_001135770 | | | |
| | | NM_006505 | | | |
| 84268 | MGC4189 | NM_001033002 | RPA interacting | 453 | 454 |
| | | | protein | | |
| 120227 | CYP2R1 | NM_024514 | Cytochrome P450, | 455 | 456 |
| | | | family 2, subfamily | | |
| | | | R, polypeptide 1 | | |
| 7453 | WARS | NM_004184 | Tryptophanyl-tRNA | 457 | 458 |
| | | NM_173701 | synthetase | | |
| | | NM_213645 | | | |
| | | NM_213646 | | | |
| 83990 | BRIP1 | NM_032043 | BRCA1 interacting | 459 | 460 |
| | | | protein C-terminal | | |
| | | | helicase 1 | | |
| 146310 | RNF151 | NM_174903 | Ring finger protein | 461 | 462 |
| | | | 151 | | |
| 124152 | MGC35048 | NM_153208 | IQ motif containing K | 463 | 464 |
| 135114 | HINT3 | NM_138571 | Histidine triad | 465 | 466 |
| | | | nucleotide binding | | |
| | | | protein 3 | | |
| 143686 | SESN3 | NM_144665 | Sestrin 3 | 467 | 468 |
| 157310 | MGC22776 | NM_144962 | Phosphatidylethanolamine- | 469 | 470 |
| | | | binding protein 4 | | |
| 7187 | TRAF3 | NM_003300 | TNF receptor- | 471 | 472 |
| | | NM_145725 | associated factor 3 | | |
| | | NM_145726 | | | |
| 26548 | ITGB1BP2 | NM_012278 | Integrin beta 1 | 473 | 474 |
| | | | binding protein | | |
| | | | (melusin) 2 | | |
| 1271 | CNTFR | NM_001842 | Ciliary neurotrophic | 475 | 476 |
| | | NM_147164 | factor receptor | | |
| 84081 | DKFZP434K1421 | NM_032141 | Coiled-coil domain | 477 | 478 |
| | | | containing 55 | | |
| 150684 | COMMD1 | NM_152516 | Copper metabolism | 479 | 480 |
| | | | (Murr1) domain | | |
| | | | containing 1 | | |
| 151325 | MYADML | NM_207329 | myeloid-associated | 481 | 482 |
| | | | differentiation | | |
| | | | marker-like | | |
| 2893 | GRIA4 | NM_000829 | glutamate receptor, | 483 | 484 |
| | | NM_001077243 | ionotrophic, AMPA 4 | | |
| | | NM_001077244 | | | |
| | | NM_001112812 | | | |
| 412 | STS | NM_000351 | steroid sulfatase | 485 | 486 |
| | | | (microsomal), | | |
| | | | isozyme S | | |
| 83787 | SVH | NM_031905 | Aka: armadillo repeat | 487 | 488 |
| | | | containing 10 | | |
| 3381 | IBSP | NM_004967 | integrin-binding | 489 | 490 |
| | | | sialoprotein | | |
| 91408 | MGC23908 | NM_001136497 | basic transcription | 491 | 492 |
| | | NM_152265 | factor 3-like 4 | | |
| 386680 | KRTAP18-5 | NM_198694 | KRTAP10-5 keratin | 493 | 494 |
| | | | associated protein 10-5 | | |
| 84687 | PPP1R9B | NM_032595 | protein phosphatase | 495 | 496 |
| | | | 1, regulatory | | |
| | | | (inhibitor) subunit 9B | | |
| 150244 | FLJ31568 | NM_152509 | zinc finger, DHHC- | 497 | 498 |
| | | | type containing 8 | | |
| | | | pseudogene | | |
| 10137 | RBM12 | NM_006047 | RNA binding motif | 499 | 500 |
| | | NM_152838 | protein 12 | | |
| 83932 | DKFZP547N043 | NM_001010984 | Aka: chromosome 1 | 501 | 502 |
| | | NM_032018 | open reading frame | | |
| | | | 124 | | |
| 56135 | PCDHAC1 | NM_018898 | protocadherin alpha | 503 | 504 |
| | | NM_031882 | subfamily C, 1 | | |
| 10725 | NFAT5 | NM_001113178 | nuclear factor of | 505 | 506 |
| | | NM_006599 | activated T-cells 5, | | |
| | | NM_138713 | tonicity-responsive | | |
| | | NM_138714 | | | |
| | | NM_173214 | | | |
| 3273 | HRG | NM_000412 | histidine-rich | 507 | 508 |
| | | | glycoprotein | | |
| 65217 | PCDH15 | NM_001142763 | protocadherin 15 | 509 | 510 |
| | | NM_001142764. | | | |
| | | NM_001142765 | | | |
| | | NM_001142766 | | | |
| | | NM_001142767 | | | |
| | | NM_001142768 | | | |
| | | NM_001142769 | | | |
| | | NM_001142770 | | | |
| | | NM_001142771 | | | |
| | | NM_001142772 | | | |
| | | NM_001142773 | | | |
| | | NM_033056 | | | |
| 8336 | HIST1H2AM | NM_003514 | Histone cluster 1, | 511 | 512 |
| | | | H2am | | |
| 440515 | ZNF506 | NM_001099269 | Zinc finger protein | 513 | 514 |
| | | NM_001145404 | 506 | | |
| 23547 | ILT7 | NM_012276 | Aka: leukocyte | 515 | 516 |
| | | | immunoglobulin-like | | |
| | | | receptor, subfamily A | | |
| | | | (with TM domain), | | |
| | | | member 4 | | |
| 10436 | C2F | NM_006331 | Aka: EMG1 | 517 | 518 |
| | | | nucleolar protein | | |
| | | | homolog | | |
| 10571 | SMA3 | NM_006780 | SMA3/SMA4 | 519 | 520 |
| | | NM_021652 | glucuronidase | | |
| 688 | KLF5 | NM_001730 | Kruppel-like factor 5 | 521 | 522 |
| | | | (intestinal) | | |
| 373863 | DND1 | NM_194249 | Dead end homolog 1 | 523 | 524 |
| | | | (zebrafish) | | |
| 162979 | ZNF342 | NM_145288 | Aka: zinc finger | 525 | 526 |
| | | | protein 296 | | |
| 8826 | IQGAP1 | NM_003870 | IQ motif containing | 527 | 528 |
| | | | GTPase activating | | |
| | | | protein 1 | | |
| 27006 | FGF22 | NM_020637 | Fibroblast growth | 529 | 530 |
| | | | factor 22 | | |
| 4303 | MLLT7 | NM_005938 | Aka: forkhead box | 531 | 532 |
| | | | O4 | | |
| 9798 | KIAA0174 | NM_014761 | KIAA0174 | 533 | 534 |
| 388170 | LOC388170 | XM_373646 | hypothetical | 535 | 536 |
| | | | LOC388170 | | |
| 2956 | MSH6 | NM_000179 | MutS homolog 6 (E. coli) | 537 | 538 |
| 3897 | L1CAM | NM_000425 | L1 cell adhesion | 539 | 540 |
| | | NM_001143963 | molecule | | |
| | | NM_024003 | | | |
| 2160 | F11 | NM_000128 | Coagulation factor XI | 541 | 542 |
| 23435 | TARDBP | NM_007375 | TAR DNA binding | 543 | 544 |
| | | | protein | | |
| 3162 | HMOX1 | NM_002133 | Heme oxygenase | 545 | 546 |
| | | | (decycling) 1 | | |
| 8694 | DGAT1 | NM_012079 | Diacylglycerol O- | 547 | 548 |
| | | | acyltransferase | | |
| | | | homolog 1 (mouse) | | |
| 5289 | PIK3C3 | NM_002647 | Phosphoinositide-3- | 549 | 550 |
| | | | kinase, class 3 | | |
| 84460 | KIAA1789 | NM_001011657 | Aka: zinc finger, | 551 | 552 |
| | | NM_032441 | matrin type 1 | | |
| 3276 | HRMT1L2 | NM_001536 | Aka: protein arginine | 553 | 554 |
| | | NM_198318 | methyltransferase 1 | | |
| | | NM_198319 | | | |
| 7512 | XPNPEP2 | NM_003399 | X-prolyl | 555 | 556 |
| | | | aminopeptidase | | |
| | | | (aminopeptidase P) 2, | | |
| | | | membrane-bound | | |
| 3632 | INPP5A | NM_005539 | Inositol | 557 | 558 |
| | | | polyphosphate-5- | | |
| | | | phosphatase, 40 kDa | | |
| 10616 | C20ORF18 | NM_006462 | Aka: RanBP-type and | 559 | 560 |
| | | NM_031229 | C3HC4-type zinc | | |
| | | | finger containing 1 | | |
| 51366 | DD5 | NM_015902 | Aka: ubiquitin | 561 | 562 |
| | | | protein ligase E3 | | |
| | | | component n- | | |
| | | | recognin 5 | | |
| 4125 | MAN2B1 | NM_000528 | Mannosidase, alpha, | 563 | 564 |
| | | | class 2B, member 1 | | |
| 10633 | RRP22 | NM_001007279 | Aka: RAS-like, | 565 | 566 |
| | | NM_006477 | family 10, member A | | |
| 254225 | KIAA1991 | NM_001098638 | Aka: ring finger | 567 | 568 |
| | | | protein 169 | | |
| 4671 | BIRC1 | NM_004536 | Aka: NLR family, | 569 | 570 |
| | | NM_022892 | apoptosis inhibitory | | |
| | | | protein | | |
| 339318 | ZNF181 | NM_001029997 | Zinc finger protein | 571 | 572 |
| | | NM_001145665 | 181 | | |
| 135932 | FLJ90586 | NM_153345 | Aka: transmembrane | 573 | 574 |
| | | | protein 139 | | |
| 348180 | LOC348180 | NM_001012759 | chromosome 16 open | 575 | 576 |
| | | NM_001012762 | reading frame 84 | | |
| 2002 | ELK1 | NM_001114123 | ELK1, member of | 577 | 578 |
| | | NM_005229 | ETS oncogene family | | |
| 3034 | HAL | NM_002108 | Histidine ammonialyase | 579 | 580 |
| 11108 | PRDM4 | NM_012406 | PR domain | 581 | 582 |
| | | | containing 4 | | |
| 84639 | IL1F10 | NM_032556 | Interleukin 1 family, | 583 | 584 |
| | | NM_173161 | member 10 (theta) | | |
| 5087 | PBX1 | NM_002585 | Pre-B-cell leukemia | 585 | 586 |
| | | | homeobox 1 | | |
| 90317 | ZNF616 | NM_178523 | Zinc finger protein | 587 | 588 |
| | | | 616 | | |
| 10288 | LILRB2 | NM_001080978 | Leukocyte | 589 | 590 |
| | | NM_005874 | immunoglobulin-like | | |
| | | | receptor, subfamily B | | |
| | | | (with TM and ITIM | | |
| | | | domains), member 2 | | |
| 64582 | GPR135 | NM_022571 | G protein-coupled | 591 | 592 |
| | | | receptor 135 | | |
| 7082 | TJP1 | NM_003257 | tight junction protein | 593 | 594 |
| | | NM_175610 | 1 (zona occludens 1) | | |
| 400890 | LOC400890 | XM_379036 | LOC400890 | 595 | 596 |
| 6432 | SFRS7 | NM_001031684 | Splicing factor, | 597 | 598 |
| | | | arginine/serine-rich 7, | | |
| | | | 35 kDa | | |
| 8910 | SGCE | NM_001099400 | sarcoglycan, epsilon | 599 | 600 |
| | | NM_001099401 | | | |
| | | NM_003919 | | | |
| 408263 | MGC27121 | NM_001001343 | chromosome 5 open | 601 | 602 |
| | | | reading frame 40 | | |
| 83607 | MGC4268 | NM_031445 | AMME chromosomal | 603 | 604 |
| | | | region gene 1-like | | |
| 9825 | SPATA2 | NM_001135773 | spermatogenesis | 605 | 606 |
| | | NM_006038 | associated 2 | | |
| 5175 | PECAM1 | NM_000442 | platelet/endothelial | 607 | 608 |
| | | | cell adhesion | | |
| | | | molecule | | |
| 81575 | DKFZP434F0318 | NM_001130415 | apolipoprotein L | 609 | 610 |
| | | NM_030817 | domain containing 1 | | |
| 390033 | LOC390033 | XM_372345 | SSU72 RNA | 611 | 612 |
| | | | polymerase II CTD | | |
| | | | phosphatase homolog | | |
| 23607 | CD2AP | NM_012120 | CD2-associated | 613 | 614 |
| | | | protein | | |
| 401137 | LOC401137 | NM_214711 | chromosome 4 open | 615 | 616 |
| | | | reading frame 40 | | |
| 441734 | DKFZP434I1020 | XM_001715597 | LOC441734 similar | 617 | 618 |
| | | | to hypothetical | | |
| | | | protein | | |
| | | | DKFZp434I1020 | | |
| 7850 | IL1R2 | NM_004633 | interleukin 1 | 619 | 620 |
| | | | receptor, type II | | |
| 83593 | RASSF5 | NM_182663 | Ras association | 621 | 622 |
| | | NM_182664 | (RalGDS/AF-6) | | |
| | | NM_182665 | domain family | | |
| | | | member 5 | | |
| 387912 | LOC387912 | XM_370716 | hypothetical | 623 | 624 |
| | | | LOC387912 | | |
| 79095 | C9ORF16 | NM_024112 | chromosome 9 open | 625 | 626 |
| | | | reading frame 16 | | |
| 81698 | C15ORF5 | NM_030944 | chromosome 15 open | 627 | 628 |
| | | | reading frame 5 | | |
| 319101 | K6IRS3 | NM_175068 | Aka: keratin 73 | 629 | 630 |
| 3563 | IL3RA | NM_002183 | interleukin 3 | 631 | 632 |
| | | | receptor, alpha (low | | |
| | | | affinity) | | |
| 442191 | OR5U1 | NM_030946 | olfactory receptor, | 633 | 634 |
| | | | family 5, subfamily U | | |
| | | | member 1; replaced | | |
| | | | with olfactory | | |
| | | | receptor, family 14, | | |
| | | | subfamily J, member 1 | | |
| 89884 | LHX4 | NM_033343 | LIM homeobox 4 | 635 | 636 |
| 84189 | SLITRK6 | NM_032229 | SLIT and NTRK-like | 637 | 638 |
| | | | family, member 6 | | |
| 255626 | HIST1H2BA | NM_170610 | histone cluster 1, | 639 | 640 |
| | | | H2ba | | |
| 8139 | GAN | NM_022041 | gigaxonin | 641 | 642 |
| 399 | RHOH | NM_004310 | ras homolog gene | 643 | 644 |
| | | | family, member H | | |
| 200909 | HTR3D | NM_001145143 | 5-hydroxytryptamine | 645 | 646 |
| | | NM_182537 | (serotonin) receptor 3 | | |
| | | | family member D | | |
| 338785 | KRT6L | NM_175834 | Aka: keratin 79 | 647 | 648 |
| 284323 | LOC284323 | NM_001010880 | zinc finger protein | 649 | 650 |
| | | NM_001142577 | 780A | | |
| 669 | BPGM | NM_001724 | 2,3- | 651 | 652 |
| | | NM_199186 | bisphosphoglycerate | | |
| | | | mutase | | |
| 171568 | POLR3H | NM_001018050 | polymerase (RNA) | 653 | 654 |
| | | NM_001018052 | III (DNA directed) | | |
| | | NM_138338 | polypeptide H | | |
| | | | (22.9 kD) | | |
| 449520 | GGNBP1 | XM_001721178 | gametogenetin | 655 | 656 |
| | | XM_001721177 | binding protein 1 | | |
| 10180 | RBM6 | NM_005777 | RNA binding motif | 657 | 658 |
| | | | protein 6 | | |
| 4818 | NKG7 | NM_005601 | natural killer cell | 659 | 660 |
| | | | group 7 sequence | | |
| 27351 | D15WSU75E | NM_015704 | Aka: PPPDE | 661 | 662 |
| | | | peptidase domain | | |
| | | | conaining 2 | | |
| 26748 | GAGE7B | NM_001477 | Aka: G antigen 12I | 663 | 664 |
| 1388 | CREBL1 | NM_001136153 | Aka: activating | 665 | 666 |
| | | NM_004381 | transcription factor 6 | | |
| | | | beta | | |
| 1837 | DTNA | NM_001128175 | dystrobrevin, alpha | 667 | 668 |
| | | NM_001390 | | | |
| | | NM_001391 | | | |
| | | NM_001392 | | | |
| | | NM_032975 | | | |
| | | NM_032978 | | | |
| | | NM_032979 | | | |
| | | NM_032980 | | | |
| | | NM_032981 | | | |
| 1438 | CSF2RA | NM_006140 | colony stimulating | 669 | 670 |
| | | NM_172245 | factor 2 receptor, | | |
| | | NM_172246 | alpha, low-affinity | | |
| | | NM_172247 | (granulocyte- | | |
| | | NM_172249 | macrophage) | | |
| 23348 | DOCK9 | NM_001130048 | dedicator of | 671 | 672 |
| | | NM_001130049 | cytokinesis 9 | | |
| | | NM_001130050 | | | |
| | | NM_015296 | | | |
| 388337 | LOC388337 | XM_371018 | similar to CDRT15 | 673 | 674 |
| | | | protein | | |
| 10219 | KLRG1 | NM_005810 | killer cell lectin-like | 675 | 676 |
| | | | receptor subfamily G, | | |
| | | | member 1 | | |
| 26608 | WBSCR14 | NM_012453 | Aka: transducin | 677 | 678 |
| | | | (beta)-like 2 | | |
| 874 | CBR3 | NM_001236 | carbonyl reductase 3 | 679 | 680 |
| 10880 | ACTL7B | NM_006686 | actin-like 7B | 681 | 682 |
| 4609 | MYC | NM_002467 | v-myc | 683 | 684 |
| | | | myelocytomatosis | | |
| | | | viral oncogene | | |
| | | | homolog (avian) | | |
| 8936 | WASF1 | NM_001024934 | WAS protein family, | 685 | 686 |
| | | NM_001024935 | member 1 | | |
| | | NM_001024936 | | | |
| | | NM_003931 | | | |
| 4069 | LYZ | NM_000239 | lysozyme (renal | 687 | 688 |
| | | | amyloidosis) | | |
| 6448 | SGSH | NM_000199 | N-sulfoglucosamine | 689 | 690 |
| | | | sulfohydrolase | | |
| 7276 | TTR | NM_000371 | transthyretin | 691 | 692 |
| 30820 | KCNIP1 | NM_001034837 | Kv channel | 693 | 694 |
| | | NM_001034838 | interacting protein | | |
| | | NM_014592 | | | |
| 84264 | HAGHL | NM_032304 | hydroxyacylglutathione | 695 | 696 |
| | | NM_207112 | hydrolase-like | | |
| 3178 | HNRPA1 | NM_002136 | heterogeneous | 697 | 698 |
| | | NM_031157 | nuclear | | |
| | | | ribonucleoprotein A1 | | |
| 1462 | CSPG2 | NM_001126336 | versican | 699 | 700 |
| | | NM_004385 | | | |
| 7409 | VAV1 | NM_005428 | guanine nucleotide | 701 | 702 |
| | | | exchange factor | | |
| 10813 | UTP14A | NM_006649 | U3 small nucleolar | 703 | 704 |
| | | | ribonucleoprotein, | | |
| | | | homolog A (yeas | | |
| 388235 | LOC388235 | XM_373672 | hypothetical | 705 | 706 |
| | | | LOC643015 | | |
| 80833 | APOL3 | NM_014349 | apolipoprotein L, 3 | 707 | 708 |
| | | NM_030644 | | | |
| | | NM_145639 | | | |
| | | NM_145640 | | | |
| | | NM_145641 | | | |
| | | NM_145642 | | | |
| 144132 | FLJ32752 | NM_144666 | Aka: dynein heavy | 709 | 710 |
| | | NM_173589 | chain domain 1 | | |
| 5524 | PPP2R4 | NM_021131 | protein phosphatase | 711 | 712 |
| | | NM_178000 | 2A activator, | | |
| | | NM_178001 | regulatory subunit | | |
| | | NM_178003 | | | |
| 5024 | P2RX3 | NM_002559 | purinergic receptor | 713 | 714 |
| | | | P2X, ligand-gated ion | | |
| | | | channel | | |
| 79844 | ZDHHC11 | NM_024786 | zinc finger, DHHC- | 715 | 716 |
| | | | type containing 11 | | |
| 4858 | NOVA2 | NM_002516 | NOVA2 neuro- | 717 | 718 |
| | | | oncological ventral | | |
| | | | antigen | | |
| 8727 | CTNNAL1 | NM_003798 | Catenin (cadherin- | 719 | 720 |
| | | | associated protein), | | |
| | | | alpha-like 1 | | |
| 4254 | KITLG | NM_000899 | Kit ligand | 721 | 722 |
| | | NM_003994 | | | |
| 55781 | RIOK2 | NM_018343 | RIO kinase 2 | 723 | 724 |
| 79792 | GSDMDC1 | NM_024736 | Gasdermin D | 725 | 726 |
| 23649 | POLA2 | NM_002689 | Polymerase (DNA | 727 | 728 |
| | | | directed), alpha 2 | | |
| | | | (70 kD subunit) | | |
| 9948 | WDR1 | NM_005112 | WD repeat domain 1 | 729 | 730 |
| | | NM_017491 | | | |
| 29940 | SART2 | NM_001080976 | Dermatan sulfate | 731 | 732 |
| | | NM_013352 | epimerase | | |
| 6900 | CNTN2 | NM_005076 | Contactin 2 (axonal) | 733 | 734 |
| 886 | CCKAR | NM_000730 | Cholecystokinin A | 735 | 736 |
| | | | receptor | | |
| 87 | ACTN1 | NM_001102 | Actinin, alpha 1 | 737 | 738 |
| | | NM_001130004 | | | |
| | | NM_001130005 | | | |
| 2266 | FGG | NM_000509 | Fibrinogen gamma | 739 | 740 |
| | | NM_021870 | chain | | |
| 2936 | GSR | NM_000637 | Glutathione reductase | 741 | 742 |
| 1489 | CTF1 | NM_001142544 | Cardiotrophin 1 | 743 | 744 |
| | | NM_001330 | | | |
| 29982 | NRBF2 | NM_030759 | Nuclear receptor | 745 | 746 |
| | | | binding factor 2 | | |
| 3479 | IGF1 | NM_000618 | Insulin-like growth | 747 | 748 |
| | | NM_001111283 | factor 1 | | |
| | | NM_001111284 | (somatomedin C) | | |
| | | NM_001111285 | | | |
| 65082 | VPS33A | NM_022916 | Vacuolar protein | 749 | 750 |
| | | | sorting 33 homolog A | | |
| 51465 | UBE2J1 | NM_016021 | Ubiquitin- | 751 | 752 |
| | | | conjugating enzyme | | |
| | | | E2, J1 | | |
| 10205 | EVA1 | NM_005797 | Myelin protein zero- | 753 | 754 |
| | | NM_144765 | like 2 | | |
| 6363 | CCL19 | NM_006274 | Chemokine (C-C | 755 | 756 |
| | | | motif) ligand 19 | | |
| 5095 | PCCA | NM_000282 | Propionyl Coenzyme | 757 | 758 |
| | | NM_001127692 | A carboxylase, alpha | | |
| | | | polypeptide | | |
| 150681 | OR6B3 | NM_173351 | Olfactory receptor, | 759 | 760 |
| | | | family 6, subfamily | | |
| | | | B, member 3 | | |
| 29075 | HSPC072 | NM_014162 | LOC29075 | 761 | 762 |
| 57475 | PLEKHH1 | NM_020715 | Pleckstrin homology | 763 | 764 |
| | | | domain containing, | | |
| | | | family H (with | | |
| | | | MyTH4 domain) | | |
| | | | member 1 | | |
| 1183 | CLCN4 | NM_001830 | Chloride channel 4 | 765 | 766 |
| 341152 | OR2AT4 | NM_001005285 | Olfactory receptor, | 767 | 768 |
| | | | family 2, subfamily | | |
| | | | AT, member 4 | | |
| 84226 | C2ORF16 | NM_032266 | Chromosome 2 open | 769 | 770 |
| | | | reading frame 16 | | |
| 400550 | LOC400550 | XM_001128652 | FLJ34515 | 771 | 772 |
| | | | hypothetical gene | | |
| | | | supported by | | |
| | | | AK091834 | | |
| 2905 | GRIN2C | NM_000835 | Glutamate receptor, | 773 | 774 |
| | | | ionotropic, N-methyl | | |
| | | | D-aspartate 2C | | |
| 79841 | FLJ23598 | NM_024783 | ATP/GTP binding | 775 | 776 |
| | | | protein-like 2 | | |
| 7248 | TSC | NM_000368 | Tuberous sclerosis 1 | 777 | 778 |
| | | NM_001008567 | | | |
| 2652 | OPN1MW | NM_000513 | Opsin 1 (cone | 779 | 780 |
| | | | pigments), medium- | | |
| | | | wave-sensitive | | |
| 9955 | HS3ST3A1 | NM_006042 | Heparan sulfate | 781 | 782 |
| | | | (glucosamine) 3-O- | | |
| | | | sulfotransferase 3A1 | | |
| 10395 | DLC1 | NM_006094 | Deleted in liver | 783 | 784 |
| | | NM_024767 | cancer 1 | | |
| | | NM_182643 | | | |
| 10360 | NPM3 | NM_006993 | Nucleophosmin/nucle | 785 | 786 |
| | | | oplasmin, 3 | | |
| 3630 | INS | NM_000207 | Insulin | 787 | 788 |
| 54471 | FLJ20232 | NM_019008 | Smith-Magenis | 789 | 790 |
| | | | syndrome | | |
| | | | chromosome region, | | |
| | | | candidate 7-like | | |
| 24 | ABCA4 | NM_000350 | ATP-binding | 791 | 792 |
| | | | cassette, sub-family | | |
| | | | A (ABC1), member 4 | | |
| 6713 | SQLE | NM_003129 | Squalene epoxidase | 793 | 794 |
| 57494 | KIAA1238 | NM_020734 | Ribosomal | 795 | 796 |
| | | | modification protein | | |
| | | | rimK-like family | | |
| | | | member B | | |
| 81850 | KRTAP1-3 | NM_030966 | Keratin associated | 797 | 798 |
| | | | protein 1-3 | | |
| 23151 | KIAA0767 | NM_015124 | GRAM domain | 799 | 800 |
| | | | containing 4 | | |
| 2689 | GH2 | NM_002059 | Growth hormone 2 | 801 | 802 |
| | | NM_022556 | | | |
| | | NM_022557 | | | |
| | | NM_022558 | | | |
| 100101629 | GAGE8 | NM_012196 | G antigen 8 | 803 | 804 |
| 140691 | LOC400368 | NM_080745 | TRIM69 tripartite | 805 | 806 |
| | | NM_182985 | motif-containing 69 | | |
| 56300 | IL1F9 | NM_019618 | Interleukin 1 family, | 807 | 808 |
| | | | member 9 | | |
| 55777 | MBD5 | NM_018328 | Methyl-CpG binding | 809 | 810 |
| | | | domain protein 5 | | |
| 10380 | BPNT1 | NM_006085 | 3′(2′), 5′-bisphosphate | 811 | 812 |
| | | | nucleotidase 1 | | |
| 167127 | LOC167127 | NM_174914 | UGT3A2 UDP | 813 | 814 |
| | | | glycosyltransferase 3 | | |
| | | | family, polypeptide | | |
| | | | A2 | | |
| 124220 | LOC124220 | NM_145252 | zymogen granule | 815 | 816 |
| | | | protein 16 homolog B | | |
| | | | (rat) | | |
| 11335 | CBX3 | NM_007276 | Chromobox homolog | 817 | 818 |
| | | NM_016587 | 3 (HP1 gamma | | |
| | | | homolog) | | |
| 55752 | SEPT11 | NM_018243 | Septin 11 | 819 | 820 |
| 1277 | COL1A1 | NM_000088 | Collagen, type I, | 821 | 822 |
| | | | alpha 1 | | |
| 2566 | GABRG2 | NM_000816 | gamma-aminobutyric | 823 | 824 |
| | | NM_198903 | acid (GABA) A | | |
| | | NM_198904 | receptor, gamma 2 | | |
| 338339 | CLECSF8 | NM_080387 | Aka: C-type lectin | 825 | 826 |
| | | | domain family 4, | | |
| | | | member | | |
| 54829 | ASPN | NM_017680 | asporin | 827 | 828 |
| 50615 | IL21R | NM_021798 | interleukin 21 | 829 | 830 |
| | | NM_181078 | receptor | | |
| | | NM_181079 | | | |
| 57495 | KIAA1239 | NM_001144990 | KIAA1239 | 831 | 832 |
| 84885 | ZDHHC12 | NM_032799 | zinc finger, DHHC- | 833 | 834 |
| | | | type containing 12 | | |
| 150135 | C21ORF129 | NR_027272 | C21orf129 | 835 | |
| | | | chromosome 21 open | | |
| | | | reading frame 129 | | |
| 158228 | C9ORF122 | NR_027294 | C9orf122 | 836 | |
| | | | chromosome 9 open | | |
| | | | reading frame 122 | | |
| 347918 | FLJ33915 | NR_003290 | EP400NL EP400 N- | 837 | |
| | | | terminal like | | |
| 11039 | SMA4 | | Glucuronidase, beta | 838 | |
| | | | pseudogene | | |
| 400590 | LOC400590 | XR_042032 | hypothetical | 839 | |
| | | XR_042034 | LOC400590 | | |
| | | XR_042033 | | | |
| 643015 | LOC389900 | XR_016273 | hypothetical | 840 | |
| | | XR_018290 | LOC643015 | | |
| | | XR_037152 | | | |
| 284912 | LOC284912 | XR_1041187 | hypothetical | 841 | |
| | | | LOC284912 | | |
| 400433 | LOC400433 | XM_378538 | DNM1P40 DNM1 | 842 | |
| | | | pseudogene 40 | | |

[0195] The initial screen used two independent siRNAs for each target gene and the assays were performed in duplicate. Subsequent follow up validation assays for positive hits were performed with a total of four siRNAs against each target in triplicate (discussed in Example 4). HDAC1 siRNA served a positive control and GAPDH siRNA served as a negative control.

[0196] FIG. 9A depicts raw data from one of the two independent siRNAs series comprising the 189 pre-selected epigenetics siRNA set. The screen was carried out in duplicate (error bars are shown) and the results are ranked based on the percent GFP positive cells (scoring reactivation from the silent state). The results with the second siRNA set (denoted “replicates”) are not shown for simplicity, but detailed analysis with up to four independent siRNAs are shown with the next example. In Panels A and B, Group 1 defines siRNAs that produced >20% GFP reactivation. The siRNAs in this group, along those identified in the replicate siRNA set, were considered for further analyses.

[0197] Overall, 16 gene hits (16/189) were identified as defined by a three criteria: i) the semi-arbitrary cutoff of GFP reactivation in at least 20% of the cells; ii) reproducible reactivation with at least two independent siRNAs per target; and iii) the mean fluorescence intensity (MFI). In addition to validation tests with a total of 4 siRNAs/target, the two secondary assays were employed to detect false negatives as described above. Unless specified, all hits in the screen could be reproduced with two independent cell populations in which the silent GFP was under control of different promoters. The hits are discussed in detail in Example 4, but first the general profile of the assay, validation and secondary assays is discussed.

[0198] As shown in FIG. 9, screening of this pre-selected epigenetic siRNA set did not produce an all-or-none binary readout, but rather, a graded reactivation response was noted among the hits. This profile is expected, as target proteins have different half lives of decay after mRNA knockdown and only one time point was selected for GFP readout (96 hours). Furthermore the diverse biological roles of the targets in silencing may not produce identical effects in the assay. For example, some epigenetic regulators could have cell-cycle specific roles, and as such only a subset of cells may be sensitive within the course of the experiment. Overall, the screen provides a broad snapshot, and is not universally optimized for measuring the effect of each siRNA.

[0199] Another parameter of the screen that was considered is the expression profile of target genes in the HeLa reporter cells. For example, a non-hit could reflect the fact that the gene is simply not expressed. For the proof of concept studies (Example 1), it was confirmed that the expression of targets using extensive qRT-PCR and western analysis, both pre- and post-siRNA knockdown. However, to avoid labor intensive and expensive screening of the entire library for evidence of expression of target genes, published or publicly available resources have thus far been used to assess this parameter. For example, the available microarray data and compiled evidence, for protein expression from published or commercial sources was used. As an example, in the proof of concept studies, it was confirmed that HDAC1, 2, 3, and 4 are expressed in HeLa cells (see Example 1). Public microarray data relevant to the remaining HDAC family members (HDAC 5, 6, 7, 8, 9, 10, 11) was not in agreement. However, evidence was found for protein expression of all HDACs in HeLa cells by surveying commercial sources for HDAC antibodies.

[0200] The proof-of-concept experiments indeed confirmed the involvement of HDAC1 (see Example 1). However, it seemed possible that additional hits might be limited to factors that that are present in HDAC co-repressor complexes. This was not the case. Instead, the screen has identified additional codependent factors, possibly reflecting what has been described as a “cooperative and self-reinforcing organization of the chromatin and DNA modifying machinery,” as described below.

### Example 4

[0201] This example describes the validation of several modulators of epigenetic silencing identified as described in Example 3. Below, eight of the 16 validated hits from the epigenetics siRNA set are discussed.

[0202] Among the 16 validated hits was SETDB1, a histone methyltransferase (HMT) that mediates H3K9 methylation (FIG. 9, 11A). This finding indicates a role for the repressive H3K9 methylation in silencing of the GFP reporter gene. This gene hit was confirmed with four independent siRNAs (FIG. 12). None of the other known H3K9 HMT family members scored in the assay (FIG. 11A). As a further comparison, it is shown in diagrammatic fashion, all of the siRNAs that were included in the pre-selected siRNA set that target enzymes involved in methylation and demethylation of the H3 N-terminal tail (FIG. 12). As H3K9 is generally associated with transcriptional repression, it was anticipated that potential hits would include H3K9 HMTs, but not H3K9 demethylases, and that is indeed what was observed (FIG. 13). Similarly, as H3K4 methylation is associated with the start sites of active, or “primed” genes. As such, H3K4 HMTs would not be expected to play a role in silencing. The results in FIGS. 11A and 13 thereby highlight the high degree of specificity and functional relevance revealed by this siRNA-based screen. A provisional hit with JHDM1b siRNA (FIG. 13) was also observed. This enzyme is a HDM that acts on H3K36 methyl substrates. The H3K36 methyl modification is associated with the body of active genes and it is therefore possible that the H3K36 demethylase could play a repressive role.

[0203] As mentioned in Example 1, a role for HP1γ in silencing (using siRNA and other methods) was identified, supporting a generally accepted model whereby the H3K9 mark provides a binding site for HP1. In this case, the SETDB1 would serve as the “writer,” with HP1 serving as an “effector.” HP1 could drive formation of repressive chromatin or recruit other repressive factors. To evaluate further the significance of these hits, chromatin immunoprecipitation (ChIP) assays were performed to measure HP1 occupancy at the silent GFP promoter. Preliminary results shown in FIG. 11B indicate that the H3K9 trimethyl mark and HP1γ are present at the promoter of the silent GFP gene.

[0204] Among the other hits was a DNA methyltransferase, DNMT3A (FIG. 7B). This DNMT has been considered a de novo DNMT rather than a maintenance methylase; however DNMT3A has been implicated in silencing and can be localized to certain silent loci. As mentioned above, the intensity of the GFP response varied, as measured by percentage of cells in which GFP is reactivated. The DNMT3A siRNAs produced a characteristic weaker reactivation (FIG. 12). It is possible that the lower level of reactivation may reflect a requirement for significant dilution of existing DNA methylation pattern via multiple S-phases, subsequent to DNMT knockdown. An alternative explanation for the limited response to DNMT3A siRNA is that this protein plays a role in only a subset of cells in the population. To further evaluate the significance of this hit, the effects of knockdown of other DNMT family members (FIG. 14) was compared. As shown, the two independent DNMT3A siRNA replicates produced a similar level of reactivation (in duplicate tests), while no significant effects were observed with siRNAs targeting other family members.

[0205] DNMTs can play both enzymatic and non-enzymatic roles in epigenetic silencing. Non-enzymatic functions include recruitment of repressive factors, such as HDACs. As siRNA knockdown of DNMT3A would affect both enzymatic and non-enzymatic activities of DNMT3A, DNMT inhibitors were used to investigate an enzymatic role. Optimization of inhibitor concentrations and prolonged treatment revealed a similar level of reactivation as was observed with DNMT3A siRNA. This is indicative that DNMT3A enzymatic activity may contribute to silencing in this system. As was the case with HDAC siRNAs and HDAC inhibitors, the DNMT siRNA phenocopies the effect of a DNMT inhibitor. Such parallel chemical and siRNA approaches are generally used to identify drug targets and here have been used for the same principle to reinforce the preliminary interpretations regarding the roles of silencing factors.

[0206] A validated hit was also detected for another silencing factor, a DNA methyl binding domain (MBD) protein (FIG. 12), which may play several roles in silencing, including as an adapter for recognition of methylated DNA. In this case, the secondary assay for interference with GFP readout indicated that one of the four MBD siRNAs produced a false negative hit (FIG. 12). Thus, this hit was confirmed with a minimum of three independent siRNAs, with the fourth siRNA being uninformative.

[0207] Another strong and validated hit was CHAF1A (FIGS. 9 and 12). This gene encodes the CAF-1 p150 subunit of the CAF-1 histone chaperone. Previously, the p150 subunit was implicated in transfer of the SETDB1-mediated H3K9 methylation during S-phase. Thus, the screen has revealed a role for a non-enzymatic factor whose role is to participate in transfer or “inheritance” of marks. Furthermore CAF-1 p150 is known to functionally interact with another gene hit, SETDBI.

[0208] The disclosures of each and every patent, patent application, and publication cited herein are hereby incorporated herein by reference in their entirety. While this invention has been disclosed with reference to specific embodiments, it is apparent that other embodiments and variations of this invention may be devised by others skilled in the art without departing from the true spirit and scope of the invention. The appended claims are intended to be construed to include all such embodiments and equivalent variations.

What is claimed:

1. A method of identifying a gene product that is involved in epigenetic silencing, comprising:
providing a cell line comprising a genome into which is integrated an epigenetically silent reporter gene;
providing a mRNA inhibitor capable of inhibiting expression of a target mRNA, the product of which is suspected of being involved in the epigenetic silencing;
introducing the mRNA inhibitor into the cell line, thereby inhibiting expression of the target RNA; and
detecting an increase in expression of the reporter gene, the increase in expression being indicative that the product of expression of the target mRNA is involved in the epigenetic silencing.

2. The method of claim 1, wherein the cell line is of human origin.

3. The method of claim 1, wherein the cell line is a HeLa cell line.

4. The method of claim 1, wherein the silent reporter gene encodes a green fluorescent protein.

5. The method of claim 1, wherein the silent reporter gene is disposed within a retroviral vector.

6. The method of claim 1, wherein the silent reporter gene is operably linked to a promoter selected from a viral LTR promoter, a hCMV promoter, a EF1α promoter and a RNA Pol II promoter.

7. The method of claim 1, wherein the mRNA inhibitor is an antisense molecule, an siRNA, a miRNA or a ribozyme.

8. The method of claim 1, wherein the target mRNA comprises one or more of a mRNA encoding HDAC1, daxx or HP1γ.

9. The method of claim 1, wherein the target mRNA comprises one or more of a mRNA exemplified by SEQ ID NOS: 1, 3, 5, 7, 9, 11, 13, 15, 17, 19, 21, 23, 25, 27, 29, 31, 33, 35, 37, 39, 41, 43, 45, 47, 49, 51, 53, 55, 57, 59, 61, 63, 65, 67, 69, 71, 73, 75, 77, 79, 81, 83, 85, 87, 89, 91, 93, 95, 97, 99, 101, 103, 105, 107, 109, 111, 113, 115, 117, 119, 121, 123, 125, 127, 129, 131, 133, 135, 137, 139, 141, 143, 145, 147, 149, 151, 153, 155, 157, 159, 161, 163, 165, 167, 169, 171, 173, 175, 177, 179, 181, 183, 185, 187, 189, 191, 193, 195, 197, 199, 201, 203, 205, 207, 209, 211, 213, 215, 217, 219, 221, 223, 225, 227, 229, 231, 233, 235, 237, 239, 241, 243, 245, 247, 249, 251, 253, 255, 257, 259, 261, 263, 265, 267, 269, 271, 273, 275, 277, 279, 281, 283, 285, 287, 289, 291, 293, 295, 297, 299, 301, 303, 305, 307, 309, 311, 313, 315, 317, 319, 321, 323, 325, 327, 329, 331, 333, 335, 337, 339, 341, 343, 345, 347, 349, 351, 353, 355, 357, 359, 361, 363, 365, 367, 369, 371, 373, 375, 377, 379, 381, 383, 385, 387, 389, 391, 393, 395, 397, 399, 401, 403, 405, 407, 409, 411, 413, 415, 417, 419, 421, 423, 425, 427, 429, 431, 433, 435, 437, 439, 441, 443, 445, 447, 449, 451, 453, 455, 457, 459, 461, 463, 465, 467, 469, 471, 473, 475, 477, 479, 481, 483, 485, 487, 489, 491, 493, 495, 497, 499, 501, 503, 505, 507, 509, 511, 513, 515, 517, 519, 521, 523, 525, 527, 529, 531, 533, 535, 537, 539, 541, 543, 545, 547, 549, 551, 553, 555, 557, 559, 561, 563, 565, 567, 569, 571, 573, 575, 577, 579, 581, 583, 585, 587, 589, 591, 593, 595, 597, 599, 601, 603, 605, 607, 609, 611, 613, 615, 617, 619, 621, 623, 625, 627, 629, 631, 633, 635, 637, 639, 641, 643, 645, 647, 649, 651, 653, 655, 657, 659, 661, 663, 665, 667, 669, 671, 673, 675, 677, 679, 681, 683, 685, 687, 689, 691, 693, 695, 697, 699, 701, 703, 705, 707, 709, 711, 713, 715, 717, 719, 721, 723, 725, 727, 729, 731, 733, 735, 737, 739, 741, 743, 745, 747, 749, 751, 753, 755, 757, 759, 761, 763, 765, 767, 769, 771, 773, 775, 777, 779, 781, 783, 785, 787, 789, 791, 793, 795, 797, 799, 801, 803, 805, 807, 809, 811, 813, 815, 817, 819, 821, 823, 825, 827, 829, 831, 833, 835, 836, 837, 838, 839, 840, 841 and 842.

10. The method of claim 7, wherein the mRNA inhibitor comprises two or more siRNA targeting the same target mRNA.

11. The method of claim 1, adapted to comprise a high-throughput screening system, comprising a plurality of assay chambers in which each assay chamber comprises cells of the cell line into which different mRNA inhibitors are introduced.

12. A kit for identifying a gene product that is involved in epigenetic silencing, comprising a container and instructions, and further comprising one or more of (1) a cell line comprising a genome into which is integrated an epigenetically silent reporter gene; and (2) a mRNA inhibitor capable of inhibiting expression of a target mRNA, the product of which is suspected of being involved in the epigenetic silencing.

13. The kit of claim 12, adapted for practicing the method of claim 1 in plurality, comprising a plurality of assay containers and a plurality of mRNA inhibitors.

14. The kit of claim 13, comprising a multi-well plate, wherein the reporter gene encodes a gene product that is directly or indirectly fluorescently detectable.

15. A gene product that functions in maintaining epigenetic silencing, selected from HDAC1, Daxx, HP1γ, MBD1, MBD2, MBD3, SETDB1 (also known as ESET or KMT1E), DNMT3A, RING1, PHC2 (also known as HPH2), CHAF1A (also known CAF-1 p150), TRIM24 (also known as TIF1alpha), TRIM33 (also known as TIF1gamma), JMJD2A (also known as KDM4A), SUV420H2 (also known as KMT5C), RAD21, FBXL11 (also known as JHDM1a and KDM2A), PBRM1 (also known as BAF180) and ZMYND8.

16. The gene product of claim 15, selected from MBD1, MBD2, MBD3, SETDB1 (also known as ESET or KMT1E) and DNMT3A.

17. The gene product of claim 15, selected from RING1, PHC2 (also known as HPH2) and CHAF1A (also known CAF-1 p150).

18. The gene product of claim 15, selected from TRIM24 (also known as TIF1alpha), TRIM33 (also known as TIF1gamma), JMJD2A (also known as KDM4A) and SUV420H2 (also known as KMT5C).

19. The gene product of claim 15, selected from RAD21 and FBXL11 (also known as JHDM1a and KDM2A).

20. The gene product of claim 15, selected from PBRM1 (also known as BAF180) and ZMYND8.

21. A method of relieving epigenetic silencing in a cell, the method comprising contacting a cell with at least one nucleic acid inhibitor, wherein the nucleic acid inhibitor inhibits production or expression of one or more mRNA molecule in the cell, wherein the mRNA molecule in the cell is selected from the group consisting of SEQ NOS: 1, 3, 5, 7, 9, 11, 13, 15, 17, 19, 21, 23, 25, 27, 29, 31, 33, 35, 37, 39, 41, 43, 45, 47, 49, 51, 53, 55, 57, 59, 61, 63, 65, 67, 69, 71, 73, 75, 77, 79, 81, 83, 85, 87, 89, 91, 93, 95, 97, 99, 101, 103, 105, 107, 109, 111, 113, 115, 117, 119, 121, 123, 125, 127, 129, 131, 133, 135, 137, 139, 141, 143, 145, 147, 149, 151, 153, 155, 157, 159, 161, 163, 165, 167, 169, 171, 173, 175, 177, 179, 181, 183, 185, 187, 189, 191, 193, 195, 197, 199, 201, 203, 205, 207, 209, 211, 213, 215, 217, 219, 221, 223, 225, 227, 229, 231, 233, 235, 237, 239, 241, 243, 245, 247, 249, 251, 253, 255, 257, 259, 261, 263, 265, 267, 269, 271, 273, 275, 277, 279, 281, 283, 285, 287, 289, 291, 293, 295, 297, 299, 301, 303, 305, 307, 309, 311, 313, 315, 317, 319, 321, 323, 325, 327, 329, 331, 333, 335, 337, 339, 341, 343, 345, 347, 349, 351, 353, 355, 357, 359, 361, 363, 365, 367, 369, 371, 373, 375, 377, 379, 381, 383, 385, 387, 389, 391, 393, 395, 397, 399, 401, 403, 405, 407, 409, 411, 413, 415, 417, 419, 421, 423, 425, 427, 429, 431, 433, 435, 437, 439, 441, 443, 445, 447, 449, 451, 453, 455, 457, 459, 461, 463, 465, 467, 469, 471, 473, 475, 477, 479, 481, 483, 485, 487, 489, 491, 493, 495, 497, 499, 501, 503, 505, 507, 509, 511, 513, 515, 517, 519, 521, 523, 525, 527, 529, 531, 533, 535, 537, 539, 541, 543, 545, 547, 549, 551, 553, 555, 557, 559, 561, 563, 565, 567, 569, 571, 573, 575, 577, 579, 581, 583, 585, 587, 589, 591, 593, 595, 597, 599, 601, 603, 605, 607, 609, 611, 613, 615, 617, 619, 621, 623, 625, 627, 629, 631, 633, 635, 637, 639, 641, 643, 645, 647, 649, 651, 653, 655, 657, 659, 661, 663, 665, 667, 669, 671, 673, 675, 677, 679, 681, 683, 685, 687, 689, 691, 693, 695, 697, 699, 701, 703, 705, 707, 709, 711, 713, 715, 717, 719, 721, 723, 725, 727, 729, 731, 733, 735, 737, 739, 741, 743, 745, 747, 749, 751, 753, 755, 757, 759, 761, 763, 765, 767, 769, 771, 773, 775, 777, 779, 781, 783, 785, 787, 789, 791, 793, 795, 797, 799, 801, 803, 805, 807, 809, 811, 813, 815, 817, 819, 821, 823, 825, 827, 829, 831, 833, 835, 836, 837, 838, 839, 840, 841 and 842, and wherein the inhibition results in relief of epigenetic silencing in the cell.

22. The method of claim 21, wherein the cell is a human cell.

23. The method of claim 21, wherein the nucleic acid inhibitor is at least one of the group consisting of an antisense molecule, an siRNA, a miRNA or a ribozyme.

24. A method of relieving epigenetic silencing in a cell, the method comprising contacting a cell with at least one nucleic acid inhibitor, wherein the nucleic acid inhibitor inhibits production or expression of one or more mRNA molecule in the cell, wherein the mRNA molecule in the cell is selected from the group consisting of HDAC1, Daxx, HP1γ, MBD1, MBD2, MBD3, SETDB1 (also known as ESET or KMT1E), DNMT3A, RING1, PHC2 (also known as HPH2), CHAF1A (also known CAF-1 p150), TRIM24 (also known as TIF1alpha), TRIM33 (also known as TIF1 gamma), JMJD2A (also known as KDM4A), SUV420H2 (also known as KMT5C), RAD21, FBXL11 (also known as JHDM1a and KDM2A), PBRM1 (also known as BAF180) and ZMYND8, and wherein the inhibition results in relief of epigenetic silencing in the cell.

25. The method of claim 24, wherein the cell is a human cell.

26. The method of claim 24, wherein the nucleic acid inhibitor is at least one of the group consisting of an antisense molecule, an siRNA, a miRNA or a ribozyme.

The application's sequence listing, which the Patent Office published only in electronic form, follows.

SEQUENCE LISTING (863 sequences)

SEQ ID NO: 1 - DNA, 2091 bp, Homo sapiens
  CDS (64)..(1512)
gagcggagccgcgggcgggagggcggacggaccgactgacggtagggacgggaggcgagcaagatggcgcagacgcagggcacccggaggaaagtctgttactactacgacggggatgttggaaattactattatggacaaggccacccaatgaagcctcaccgaatccgcatgactcataatttgctgctcaactatggtctctaccgaaaaatggaaatctatcgccctcacaaagccaatgctgaggagatgaccaagtaccacagcgatgactacattaaattcttgcgctccatccgtccagataacatgtcggagtacagcaagcagatgcagagattcaacgttggtgaggactgtccagtattcgatggcctgtttgagttctgtcagttgtctactggtggttctgtggcaagtgctgtgaaacttaataagcagcagacggacatcgctgtgaattgggctgggggcctgcaccatgcaaagaagtccgaggcatctggcttctgttacgtcaatgatatcgtcttggccatcctggaactgctaaagtatcaccagagggtgctgtacattgacattgatattcaccatggtgacggcgtggaagaggccttctacaccacggaccgggtcatgactgtgtcctttcataagtatggagagtacttcccaggaactggggacctacgggatatcggggctggcaaaggcaagtattatgctgttaactacccgctccgagacgggattgatgacgagtcctatgaggccattttcaagccggtcatgtccaaagtaatggagatgttccagcctagtgcggtggtcttacagtgtggctcagactccctatctggggatcggttaggttgcttcaatctaactatcaaaggacacgccaagtgtgtggaatttgtcaagagctttaacctgcctatgctgatgctgggaggcggtggttacaccattcgtaacgttgcccggtgctggacatatgagacagctgtggccctggatacggagatccctaatgagcttccatacaatgactactttgaatactttggaccagatttcaagctccacatcagtccttccaatatgactaaccagaacacgaatgagtacctggagaagatcaaacagcgactgtttgagaaccttagaatgctgccgcacgcacctggggtccaaatgcaggcgattcctgaggacgccatccctgaggagagtggcgatgaggacgaagacgaccctgacaagcgcatctcgatctgctcctctgacaaacgaattgcctgtgaggaagagttctccgattctgaagaggagggagaggggggccgcaagaactcttccaacttcaaaaaagccaagagagtcaaaacagaggatgaaaaagagaaagacccagaggagaagaaagaagtcaccgaagaggagaaaaccaaggaggagaagccagaagccaaaggggtcaaggaggaggtcaagttggcctgaatggacctctccagctctggcttcctgctgagtccctcacgtttcttccccaacccctcagattttatattttctatttctctgtgtatttatataaaaatttattaaatataaatatccccagggacagaaaccaaggccccgagctcagggcagctgtgctgggtgagctcttccaggagccaccttgccacccattcttcccgttcttaactttgaaccataaagggtgccaggtctgggtgaaagggatacttttatgcaaccataagacaaactcctgaaatgccaagtgcctgcttagtagctttggaaaggtgcccttattgaacattctagaaggggtggctgggtcttcaaggatctcctgtttttttcaggctcctaaagtaacatcagccatttttagattggttctgttttcgtaccttcccactggcctcaagtgagccaagaaacactgcctgccctctgtctgtcttctcctaattctgcaggtggaggttgctagtctagtttcctttttgagatactattttcatttttgtgagcctctttgtaataaaatggtacatttct

SEQ ID NO: 2 - protein, 482 aa, Homo sapiens
MAQTQGTRRKVCYYYDGDVGNYYYGQGHPMKPHRIRMTHNLLLNYGLYRKMEIYRPHKANAEEMTKYHSDDYIKFLRSIRPDNMSEYSKQMQRFNVGEDCPVFDGLFEFCQLSTGGSVASAVKLNKQQTDIAVNWAGGLHHAKKSEASGFCYVNDIVLAILELLKYHQRVLYIDIDIHHGDGVEEAFYTTDRVMTVSFHKYGEYFPGTGDLRDIGAGKGKYYAVNYPLRDGIDDESYEAIFKPVMSKVMEMFQPSAVVLQCGSDSLSGDRLGCFNLTIKGHAKCVEFVKSFNLPMLMLGGGGYTIRNVARCWTYETAVALDTEIPNELPYNDYFEYFGPDFKLHISPSNMTNQNTNEYLEKIKQRLFENLRMLPHAPGVQMQAIPEDAIPEESGDEDEDDPDKRISICSSDKRIACEEEFSDSEEEGEGGRKNSSNFKKAKRVKTEDEKEKDPEEKKEVTEEEKTKEEKPEAKGVKEEVKLA

SEQ ID NO: 3 - DNA, 2632 bp, Homo sapiens
  CDS (208)..(2430)
acgacaatatggcggcgcttagttgcatgaaggcggaaactctgtgacttccggtccgtagtggggcctgcggtgggagtgggaaggaaggcggagggaaccatgcgaggttctgagaattgcggcgagggtcgcctcgagagacggtttctgagcaggaattctgaaatccccaccacttcctccctccgggggatttgatcccctatggccaccgctaacagcatcatcgtgctggatgatgatgacgaagatgaagcagctgctcagccagggccctcccacccactccccaatgcggcctcacctggggcagaagcccctagctcctctgagcctcatggggccagaggaagcagtagttcgggcggcaagaaatgctacaagctggagaatgagaagctgttcgaagagttccttgaactttgtaagatgcagacagcagaccaccctgaggtggtcccattcctctataaccggcagcaacgtgcccactctctgtttttggcctcggcggagttctgcaacatcctctctagggtcctgtctcgggcccggagccggccagccaagctctatgtctacatcaatgagctctgcactgttctcaaggcccactcagccaaaaagaagctgaacttggcccctgccgccaccacctccaatgagccctctgggaataaccctcccacacacctctccttggaccccacaaatgctgaaaacactgcctctcagtctccaaggacccgtggttcccggcggcagatccagcgtttggagcagctgctggcgctctatgtggcagagatccggcggctgcaggaaaaggagttggatctctcagaattggatgacccagactccgcatacctgcaggaggcacggttgaagcgtaagctgatccgcctctttgggcgactatgtgagctgaaagactgctcttcactgaccggccgtgtcatagagcagcgcatcccctaccgtggcacccgctacccagaggttaacaggcgcattgagcggctcatcaacaagccagggcctgataccttccctgactatggggatgtgcttcgggctgtagagaaggcagctgcccgacacagccttggcctcccccgacagcagctccagctcatggctcaggatgccttccgagatgtgggcatcaggttacaggagcgacgtcacctcgatctcatctacaactttggctgccacctcacagatgactataggccaggcgttgaccctgcactatcagatcctgtgttggcccggcgccttcgggaaaaccggagtttggccatgagtcggctggatgaggtcatctccaaatatgcaatgttgcaagacaaaagtgaggagggcgagagaaaaaagagaagagctcggctccaaggcacctcttcccactctgcagacacccccgaagcctccttggattctggtgagggccctagtggaatggcatcccaggggtgcccttctgcctccagagctgagacagatgacgaagacgatgaggagagtgatgaggaagaggaggaggaggaggaagaagaagaggaggaggccacagattctgaagaggaggaggatctggaacagatgcaggagggtcaggaggatgatgaagaggaggacgaagaggaagaagcagcagcaggtaaagatggagacaagagccccatgtcctcactacagatctccaatgaaaagaacctggaacctggcaaacagatcagcagatcttcaggggagcagcaaaacaaaggacgcatagtgtcaccatcgttactgtcagaagaacccctggccccctccagcatagatgctgaaagcaatggagaacagcctgaggagctgaccctggaggaagaaagccctgtgtctcagctctttgagctagagattgaagctttgcccctggataccccttcctctgtggagacggacatttcctcttccaggaagcaatcagaggagcccttcaccactgtcttagagaatggagcaggcatggtctcttctacttccttcaatggaggcgtctctcctcacaactggggagattctggtcccccctgcaaaaaatctcggaaggagaagaagcaaacaggatcagggccattaggaaacagctatgtggaaaggcaaaggtcagtgcatgagaagaatgggaaaaagatatgtaccctgcccagcccaccttcccccttggcttccttggccccagttgctgattcctccacgagggtggactctcccagccatggcctggtgaccagctccctctgcatcccttctccagcccggctgtcccaaaccccccattcacagcctcctcggcctggtacttgcaagacaagtgtggccacacaatgcgatccagaagagatcatcgtgctctcagactctgattagctgcctccccttctccctgcctccagaatgttctgggataacatttggaggaaggtgggaagcagatgactgaggaagggatggactaagctaatccccttttggtggtgtttctttaaaaaaaaaaaaaagcttaagttttacacagaaacattaataaacaataaagttcttttcttactgtaaaaaaaaaaaaaaaaaa

SEQ ID NO: 4 - protein, 740 aa, Homo sapiens
MATANSIIVLDDDDEDEAAAQPGPSHPLPNAASPGAEAPSSSEPHGARGSSSSGGKKCYKLENEKLFEEFLELCKMQTADHPEVVPFLYNRQQRAHSLFLASAEFCNILSRVLSRARSRPAKLYVYINELCTVLKAHSAKKKLNLAPAATTSNEPSGNNPPTHLSLDPTNAENTASQSPRTRGSRRQIQRLEQLLALYVAEIRRLQEKELDLSELDDPDSAYLQEARLKRKLIRLFGRLCELKDCSSLTGRVIEQRIPYRGTRYPEVNRRIERLINKPGPDTFPDYGDVLRAVEKAAARHSLGLPRQQLQLMAQDAFRDVGIRLQERRHLDLIYNFGCHLTDDYRPGVDPALSDPVLARRLRENRSLAMSRLDEVISKYAMLQDKSEEGERKKRRARLQGTSSHSADTPEASLDSGEGPSGMASQGCPSASRAETDDEDDEESDEEEEEEEEEEEEEATDSEEEEDLEQMQEGQEDDEEEDEEEEAAAGKDGDKSPMSSLQISNEKNLEPGKQISRSSGEQQNKGRIVSPSLLSEEPLAPSSIDAESNGEQPEELTLEEESPVSQLFELEIEALPLDTPSSVETDISSSRKQSEEPFTTVLENGAGMVSSTSFNGGVSPHNWGDSGPPCKKSRKEKKQTGSGPLGNSYVERQRSVHEKNGKKICTLPSPPSPLASLAPVADSSTRVDSPSHGLVTSSLCIPSPARLSQTPHSQPPRPGTCKTSVATQCDPEEIIVLSDSD

SEQ ID NO: 5 - DNA, 1837 bp, Homo sapiens
  CDS (112)..(663)
cgctgaggagactccggtcactgtcctcgccccgcctcccccttccctccccttggggaccaccgggcgccacgccgcgaacgtaatagctcttcaagtctgcaataaaaaatggcctccaacaaaactacattgcaaaaaatgggaaaaaaacagaatggaaagagtaaaaaagttgaagaggcagagcctgaagaatttgtcgtggaaaaagtactagatcgacgtgtagtgaatgggaaagtggaatatttcctgaagtggaagggatttacagatgctgacaatacttgggaacctgaagaaaatttagattgtccagaattgattgaagcgtttcttaactctcagaaagctggcaaagaaaaagatggtacaaaaagaaaatctttatctgacagtgaatctgatgacagcaaatcaaagaagaaaagagatgctgctgacaaaccaagaggatttgccagaggtcttgatcctgaaagaataattggtgccacagacagcagtggagaattgatgtttctcatgaaatggaaagattcagatgaggcagacttggtgctggcgaaagaggcaaatatgaagtgtcctcaaattgtaattgctttttatgaagagagactaacttggcattcttgtccagaagatgaagctcaataattgttcacattgttcttttatatatatttatatatatatataaaaattgggtcttagattttgatttactagtgtgacaaaataactacatcctaatgaaaatcaagtttgatatgtttgttttgaaagtagcgttggaagagttgttgggggttttttgcatccatagcactggttactttgaacaaataaataaaagctttctgtagttgcttcctttatcagaaaagaacatttgataccatggtatatcatttcctcttcattaaagaacagcttttctaaatgttgggggaaatgtccatagtcattactcagtcaaaacttgtgttctcatgagcctaaggaccattctagatttattacgtgttttttgtgtgtgtgtgtgtgtgtgtgtgtgtgtgtatccataaaatgcatatgtaaatttttttttgtttttaagcattcacccaaacaaaaaaatcacaggtaaacccatgtttctgagatgccattattccaagcaaaataagagataatcccttcaagttaaattgaaaattttcctgaaaccatacatttcaagtgaaataagtaattctagataggacaatttaaattggataattttaaagtgtctataattgcagtggtttatttgcaaaattcctaaaaggaaaaattttatcactgccatcacagcaggtttcctcatccagatgaggaaactagacaaatgctagtgtgttttaactagctaaacaaaactaagttaaatgaacatttaaaagtttccctagcgggccattccttagcaaaatgttggaatccctgttgctacattgactaaaaggtcatgatgaatggaatatgtaagacttggctcatagaaacctaatcagatggttagaggtgttggcagtttaggacctgctgtcataaatgtgtgaacaaccttttgtaacctaacctattgacctgcatgttttttctttaccccaattcattacatggaggctcaatcttgagtttgctttactggttcagcaaaagccaggaagaacaactttgtagtaatcaaaatgttatccaactgtatattgtttactttattgtaaatactggtgaacagtggttaataaatagttttatattcctttatgcaaaaaaaaaaaaaaaaaaaaaaaaaaaa

SEQ ID NO: 6 - protein, 183 aa, Homo sapiens
MASNKTTLQKMGKKQNGKSKKVEEAEPEEFVVEKVLDRRVVNGKVEYFLKWKGFTDADNTWEPEENLDCPELIEAFLNSQKAGKEKDGTKRKSLSDSESDDSKSKKKRDAADKPRGFARGLDPERIIGATDSSGELMFLMKWKDSDEADLVLAKEANMKCPQIVIAFYEERLTWHSCPEDEAQ

SEQ ID NO: 7 - DNA, 3284 bp, Homo sapiens
  CDS (438)..(2255)
aaagcgcatgcgccagctagatgggcagcgaggagagccgcaactgccagtccctcgaaggggttagctgtcgttgaacgtcagcacgcagatgcaactggctctcggcaggggggcgcgcgcaccgctgcggagcgccggcccgtaggcgcgggagcctccctattaagggcacgcgacatcgaggcaatagtgcgcaggtgcttagccagaggcggagcccgagaggcaggcagcggacttccggttccgggagcaacgaacagccgcggaggcgacagctaccgcttcagaggaggcggccgcggaggaggaggaaggggaggagggcgaggcgggaggtgcaggagggaccctcgccatgggtccacgggcctagagtggcggaagataccggcctggtgccaaactggctactgctgcttcctgtggcctccatggctgaggactggctggactgcccggccctgggccctggctggaagcgccgcgaagtctttcgcaagtcaggggccacctgtggacgctcagacacctattaccagagccccacaggagacaggatccgaagcaaagttgagctgactcgatacctgggccctgcgtgtgatctcaccctcttcgacttcaaacaaggcatcttgtgctatccagcccccaaggcccatcccgtggcggttgccagcaagaagcgaaagaagccttcaaggccagccaagactcggaaacgtcaggttggaccccagagtggtgaggtcaggaaggaggccccgagggatgagaccaaggctgacactgacacagccccagcttcattccctgctcctgggtgctgtgagaactgtggaatcagcttctcaggggatggcacccaaaggcagcggctcaaaacgttgtgcaaagactgtcgagcacagagaattgccttcaaccgggaacagagaatgtttaagcgtgtgggctgtggggagtgtgcagcctgccaggtaacagaagactgtggggcctgctccacctgcctcctgcagctgccccatgatgtggcatcggggctgttctgcaagtgtgaacggagacgctgcctccggattgtggaaaggagccgagggtgtggagtatgccggggctgtcagacccaagaggattgtggccattgccccatctgccttcgccctccccgccctggtctcaggcgccagtggaaatgtgtccagcgacgttgcctacggggtaaacatgcccgccgcaagggaggctgtgactccaagatggctgccaggcggcgccccggagcccagccactgcctccaccacccccatcacagtccccagagcccacagagccgcaccccagagccctggccccctcgccacctgccgagttcatctattactgtgtagacgaggacgagctacagccctacacgaaccgccggcagaaccgcaagtgcggggcctgtgcagcctgcctacggcggatggactgtggccgctgcgacttctgctgcgacaagcccaaattcgggggcagcaaccagaagcgccagaagtgtcgttggcgccaatgcctgcagtttgccatgaagcggctgctgcccagtgtctggtcagagtctgaggatggggcaggatcgcccccaccttaccgtcgtcgaaagaggcccagctctgcccgacggcaccatcttggccctaccttgaagcccaccttggctacacgcacagcccaaccagaccatacccaggctccaacgaagcaggaagcaggtggtggctttgtgctgcccccgcctggcactgaccttgtgtttttacgggaaggcgcaagcagtcctgtgcaggtgccgggccctgttgcagcttccacagaagccctgttgcaggaggcccagtgctctggcctgagttgggttgtggccttaccccaggtgaagcaagagaaggcggatacccaggacgagtggacaccaggcacagctgtcctgacttctcccgtattggtgcctggctgccctagcaaggcagtagacccaggcctgccttctgtgaagcaagagccacctgacccagaggaggacaaggaggagaacaaggatgattctgcctccaaattggccccagaggaagaggcaggaggggctggcacacccgtgatcacggagattttcagcctgggtggaacccgcttccgagatacagcagtctggttgccaaggtccaaagaccttaaaaaacctggagctagaaagcagtagactggaggcttctacagactgtaggattcaagtctgcagggcaggcactcgggaagggaagatggatgtaaagtgtgggagaccgaggacacagtggagcccacgagcacgagctggaacccacgaggatggcctggaacccatgtcagtctctcaccacctccagcttcgatgatgtgggtgtcctgcagaagaagctggtgcccttcctcacagagttaaatatgcatctggcccaggaattagagaagctgaaaggatgatcctggggaaggtggagcagctgcaggcctggctgcaggcctgactactgcccacaccaacgaggtgatctagcagatacatggcaacgtgtgaactgcaacaacgcctggtgccccagcaccaaccttccaagtgtaaaaacaatgtgctgctgcttcacttccgccctccggttatcaagcaaaatgtctcttgtggcccatcttactggaagagagttccgggaaacatagcctcaccaaggtgacacattacaaagccaccctaccatgaatccgctcccaagggtctcactgctcacctgaggataactcaatataactatgtggctgaaaatgcaaagctgaagaccatggatttcatggtgattccagcaagtacagagattctatgaagcccacccagaaaaaacttgctggtcctggctatttttgtgtcatttattcaagtattgagaacctggcctgtggtaggcactgtacttaatactaggatacagaaatgcaaaagatacggcccatgcaattttattaaatgcatcaatatgtattacaaatggtgaatggatttccaactttatcatggaatttaatgctgaatatatagaattcagaaaattgttgggaggacagcccttttgtgaaccttgtttggggcacagtaggaattggaaataatttagtttctatctctaagctgttctattttaaaattatttttaaatttttattgtcccacttaaaaaaaaaaaaaaaaaaaaaaaaa

SEQ ID NO: 8 - protein, 605 aa, Homo sapiens
MAEDWLDCPALGPGWKRREVFRKSGATCGRSDTYYQSPTGDRIRSKVELTRYLGPACDLTLFDFKQGILCYPAPKAHPVAVASKKRKKPSRPAKTRKRQVGPQSGEVRKEAPRDETKADTDTAPASFPAPGCCENCGISFSGDGTQRQRLKTLCKDCRAQRIAFNREQRMFKRVGCGECAACQVTEDCGACSTCLLQLPHDVASGLFCKCERRRCLRIVERSRGCGVCRGCQTQEDCGHCPICLRPPRPGLRRQWKCVQRRCLRGKHARRKGGCDSKMAARRRPGAQPLPPPPPSQSPEPTEPHPRALAPSPPAEFIYYCVDEDELQPYTNRRQNRKCGACAACLRRMDCGRCDFCCDKPKFGGSNQKRQKCRWRQCLQFAMKRLLPSVWSESEDGAGSPPPYRRRKRPSSARRHHLGPTLKPTLATRTAQPDHTQAPTKQEAGGGFVLPPPGTDLVFLREGASSPVQVPGPVAASTEALLQEAQCSGLSWVVALPQVKQEKADTQDEWTPGTAVLTSPVLVPGCPSKAVDPGLPSVKQEPPDPEEDKEENKDDSASKLAPEEEAGGAGTPVITEIFSLGGTRFRDTAVWLPRSKDLKKPGARKQ

SEQ ID NO: 9 - DNA, 2584 bp, Homo sapiens
  CDS (230)..(1465)
gggggcgtggccccgagaaggcggagacaagatggccgcccatagcgcttggaggacctaagaggcggtggccggggccacgccccgggcaggagggccgctctgtgcgcgcccgctctatgatgcttgcgcgcgtcccccgcgcgccgcgctgcgggcggggcgggtctccgggattccaagggctcggttacggaagaagcgcagcgccggctggggagggggctggatgcgcgcgcacccggggggaggccgctgctgcccggagcaggaggagggggagagtgcggcgggcggcagcggcgctggcggcgactccgccatagagcaggggggccagggcagcgcgctcgccccgtccccggtgagcggcgtgcgcagggaaggcgctcggggcggcggccgtggccgggggcggtggaagcaggcgggccggggcggcggcgtctgtggccgtggccggggccggggccgtggccggggacggggacggggccggggccggggccgcggccgtcccccgagtggcggcagcggccttggcggcgacggcggcggctgcggcggcggcggcagcggtggcggcggcgccccccggcgggagccggtccctttcccgtcggggagcgcggggccggggcccaggggaccccgggccacggagagcgggaagaggatggattgcccggccctcccccccggatggaagaaggaggaagtgatccgaaaatctgggctaagtgctggcaagagcgatgtctactacttcagtccaagtggtaagaagttcagaagcaagcctcagttggcaaggtacctgggaaatactgttgatctcagcagttttgacttcagaactggaaagatgatgcctagtaaattacagaagaacaaacagagactgcgaaacgatcctctcaatcaaaataagggtaaaccagacttgaatacaacattgccaattagacaaacagcatcaattttcaaacaaccggtaaccaaagtcacaaatcatcctagtaataaagtgaaatcagacccacaacgaatgaatgaacagccacgtcagcttttctgggagaagaggctacaaggacttagtgcatcagatgtaacagaacaaattataaaaaccatggaactacccaaaggtcttcaaggagttggtccaggtagcaatgatgagacccttttatctgctgttgccagtgctttgcacacaagctctgcgccaatcacagggcaagtctccgctgctgtggaaaagaaccctgctgtttggcttaacacatctcaacccctctgcaaagcttttattgtcacagatgaagacatcaggaaacaggaagagcgagtacagcaagtacgcaagaaattggaagaagcactgatggcagacatcttgtcgcgagctgctgatacagaagagatggatattgaaatggacagtggagatgaagcctaagaatatgatcaggtaactttcgaccgactttccccaagagaaaattcctagaaattgaacaaaaatgtttccactggcttttgcctgtaagaaaaaaaatgtacccgagcacatagagctttttaatagcactaaccaatgcctttttagatgtatttttgatgtatatatctattattcaaaaaatcatgtttattttgagtcctaggacttaaaattagtcttttgtaatatcaagcaggaccctaagatgaagctgagcttttgatgccaggtgcaatctactggaaatgtagcacttacgtaaaacatttgtttcccccacagttttaataagaacagatcaggaattctaaataaatttcccagttaaagattattgtgacttcactgtatataaacatatttttatactttattgaaaggggacacctgtacattcttccatcatcactgtaaagacaaataaatgattatattcacagactgattggaattctttctgttgaaaagcacacacaataaagaacccctcgttagccttcctctgatttacattcaactctgatccctgggccttaggtttgacatggaggtggaggaagatagcgcatatatttgcagtatgaactattgcctctggacgttgtgagaattgtgctttcaccagaatttctaagaatttctgctaaatatcacctagcatgtgtaattttttttccttgcctgtgacttggacttttgatagttctataagaataaggctttttcttcccttgggcatgagtcagatacacaaggacccttcaggtgttactagaaggcgtccatgtttattgttttttaaagaatgtttggcactctctaacgtccactagcttactgagttatcaggtgcaggtcagactcttggctacagtgagaggcagcttctaggcagagttgcttaatgaaagggtttgtaatactttacaaaccattacctgtacctggcctggcctccaaaatattaacattctttttctgttgaaactcgcgagtgtaactttcataccacttgaatttattgatatttaattatgaaaactagcattacattattaaacgatttctaaaatc

SEQ ID NO: 10 - protein, 411 aa, Homo sapiens
MRAHPGGGRCCPEQEEGESAAGGSGAGGDSAIEQGGQGSALAPSPVSGVRREGARGGGRGRGRWKQAGRGGGVCGRGRGRGRGRGRGRGRGRGRGRPPSGGSGLGGDGGGCGGGGSGGGGAPRREPVPFPSGSAGPGPRGPRATESGKRMDCPALPPGWKKEEVIRKSGLSAGKSDVYYFSPSGKKFRSKPQLARYLGNTVDLSSFDFRTGKMMPSKLQKNKQRLRNDPLNQNKGKPDLNTTLPIRQTASIFKQPVTKVTNHPSNKVKSDPQRMNEQPRQLFWEKRLQGLSASDVTEQIIKTMELPKGLQGVGPGSNDETLLSAVASALHTSSAPITGQVSAAVEKNPAVWLNTSQPLCKAFIVTDEDIRKQEERVQQVRKKLEEALMADILSRAADTEEMDIEMDSGDEA

SEQ ID NO: 11 - DNA, 2559 bp, Homo sapiens
  CDS (23)..(898)
gcgggccgaggagccgggcgcaatggagcggaagaggtgggagtgcccggcgctcccgcagggctgggagagggaagaagtgcccagaaggtcggggctgtcggccggccacagggatgtcttttactatagcccgagcgggaagaagttccgcagcaagccgcagctggcgcgctacctgggcggctccatggacctgagcaccttcgacttccgcacgggcaagatgctgatgagcaagatgaacaagagccgccagcgcgtgcgctacgactcctccaaccaggtcaagggcaagcccgacctgaacacggcgctgcccgtgcgccagacggcgtccatcttcaagcagccggtgaccaagattaccaaccaccccagcaacaaggtcaagagcgacccgcagaaggcggtggaccagccgcgccagctcttctgggagaagaagctgagcggcctgaacgccttcgacattgctgaggagctggtcaagaccatggacctccccaagggcctgcagggggtgggacctggctgcacggatgagacgctgctgtcggccatcgccagcgccctgcacactagcaccatgcccatcacgggacagctctcggccgccgtggagaagaaccccggcgtatggctcaacaccacgcagcccctgtgcaaagccttcatggtgaccgacgaggacatcaggaagcaggaagagctggtgcagcaggtgcggaagcggctggaggaggcgctgatggccgacatgctggcgcacgtggaggagctggcccgtgacggggaggcgccgctggacaaggcctgcgctgaggacgacgacgaggaagacgaggaggaggaggaggaggagcccgacccggacccggagatggagcacgtctagggcaggtgctgcggggccacgggggctccctggagtcgggtcctggcagtggggactgcctggtgaacacagatgtgcttgggatgacgggtgcctcccaagagcttcccatctccctagaagagcccaagcgtccccgtcccgtggagtcgctaaagccagccctccctgtcctttccagaggccctgccgagagcccgtgctgcctgctggagccgcctgcagacgcggtcctcggccccacgtgaaccaggctcggcggcgaagcccagccttggagacacccaggaggaaggccgtgctcctggctccctcctcggcccgtccccacttcccggggcctcggggcacacagctggggctgcccccacccgaaagaccctccacgctcgtcctctacagagtccggcttcgggaagtgccgggtgctcctgggccctgcctggctccctacgacctttgggctcgaggccagctcctccccatgcccgctgtcccagctccttgagactggagagcagccagcaggtgcccggcagctcggcgccacggcttgctgacagctgggagggtttctcggtctggaggcgtagttttgaaactcacatcacccactgtgcagcgtgaggacgggactctggtctgctgtggggggcatgcaggacggcgccactctctgccctgccatgcggctggtggtgccacagagcctcaccgtgcctgagtggcatgcccaggaggccgctctccttcagtaaatgtaacacagtcgaggcacgtcatcgggcagccttccctgtgtgccaacgccagccttcgcttctgaaaaccaaactccagccgctgccagtcgggacttggtcgcccggcgctgccagaatgctccactgccagccggcccccctgcctcggtttcccttctgtttagtggcgacacaggcacccagctttggggtggtgctgacgctcccaggggtgccaggagccactgggacagggtgaggctcccagacgctcctcgaggtgcccagctctccagggagcttctggcccaaggccgtctgagggatctgctccttaaccccccagtgccttggcgagggcaggttccaagccacagacgcctgccccgagtggactctgcggccagtccctggtgccctcctggccctgctgcccagtgagggctcctacgggtgggttcattggcctgggcccagcgagcccccacctgcattgaccttaggcccatagagagggcctgtcccggtgctgccccagccaggatctggtcgctgccccagggggactgatgggcagagtcgcccctgtggctggactgtgaccatccctgatggggcctgaccgcgggagctgaggaagcgccgctccaccgtctgccctccaaggacccgcatggaggcagtgggctggcagcttcctgctgctccctgtcagagtcaaagcacaaatcctcaggacgggctcaagggccagggcagccgagggaagctccaggtggggaccacgtcttcctgaggttggtgcccactggctgggaccctttgcagtggggtggcctcccctctgtctgcctggtggagggagccgtgggcgtggggacgtgactgaataaagccaccatgggtggatgtgcttgg

SEQ ID NO: 12 - protein, 291 aa, Homo sapiens
MERKRWECPALPQGWEREEVPRRSGLSAGHRDVFYYSPSGKKFRSKPQLARYLGGSMDLSTFDFRTGKMLMSKMNKSRQRVRYDSSNQVKGKPDLNTALPVRQTASIFKQPVTKITNHPSNKVKSDPQKAVDQPRQLFWEKKLSGLNAFDIAEELVKTMDLPKGLQGVGPGCTDETLLSAIASALHTSTMPITGQLSAAVEKNPGVWLNTTQPLCKAFMVTDEDIRKQEELVQQVRKRLEEALMADMLAHVEELARDGEAPLDKACAEDDDEEDEEEEEEEPDPDPEMEHV

SEQ ID NO: 13 - DNA, 4449 bp, Homo sapiens
  CDS (191)..(4066)
ggcactaaaggtttgcttccgggcgtttcttttgcttccccttccctctttcacgcttcctcccctccccctcctcccttatcccttcgctttcgctcttttccgtcgaggccgacccctgagttgtgagtctggggtctggttggtgaaaaagagcccttgaagctggaagacgggagaggacaaaagcatgtcttcccttcctgggtgcattggtttggatgcagcaacagctacagtggagtctgaagagattgcagagctgcaacaggcagtggttgaggaactgggtatctctatggaggaacttcggcatttcatcgatgaggaactggagaagatggattgtgtacagcaacgcaagaagcagctagcagagttagagacatgggtaatacagaaagaatctgaggtggctcacgttgaccaactctttgatgatgcatccagggcagtgactaattgtgagtctttggtgaaggacttctactccaagctgggactacaataccgggacagtagctctgaggacgaatcttcccggcctacagaaataattgagattcctgatgaagatgatgatgtcctcagtattgattcaggtgatgctgggagcagaactccaaaagaccagaagctccgtgaagctatggctgccttaagaaagtcagctcaagatgttcagaagttcatggatgctgtcaacaagaagagcagttcccaggatctgcataaaggaaccttgagtcagatgtctggagaactaagcaaagatggtgacctgatagtcagcatgcgaattctgggcaagaagagaactaagacttggcacaaaggcacccttattgccatccagacagttgggccagggaagaaatacaaggtgaaatttgacaacaaaggaaagagtctactgtcggggaaccatattgcctatgattaccaccctcctgctgacaagctgtatgtgggcagtcgggtggtcgccaaatacaaagatgggaatcaggtctggctctatgctggcattgtagctgagacaccaaacgtcaaaaacaagctcaggtttctcattttctttgatgatggctatgcttcctatgtcacacagtcggaactgtatcccatttgccggccactgaaaaagacttgggaggacatagaagacatctcctgccgtgacttcatagaggagtatgtcactgcctaccccaaccgccccatggtactgctcaagagtggccagcttatcaagactgagtgggaaggcacgtggtggaagtcccgagttgaggaggtggatggcagcctagtcaggatcctcttcctggatgacaaaagatgtgagtggatctatcgaggctctacacggctggagcccatgttcagcatgaaaacatcctcagcctctgcactggagaagaagcaaggacagctcaggacacgtccaaatatgggtgctgtgaggagcaaaggccctgttgtccagtacacacaggatctgaccggtactggaacccagttcaagccagtggaacccccacagcctacagctccacctgccccacctttcccacctgctccacctctatccccccaagcaggtgacagtgacttggaaagccagcttgcccagtcacggaagcaggtagccaaaaagagcacgtcctttcgaccaggatctgtgggctctggtcattcctcccctacatctcctgcactcagtgaaaatgtctctggtgggaaacctgggatcaaccagacatatagatcacctttaggctccacagcctctgccccagcaccctcagcactcccggcccctccagcacccccagtcttccatggcatgctggagcgggccccagcagagccctcctaccgtgctcccatggagaagcttttctacttacctcatgtctgcagctatacctgtctgtctcgagtcagacctatgaggaatgagcagtaccggggcaagaaccctctgctggtcccgttactatatgacttccggcggatgacagcccggcgtcgagttaaccgcaagatgggctttcatgttatctataagacaccttgtggtctctgccttcggacaatgcaggagatagaacgctaccttttcgagactggctgtgacttcctcttcctggagatgttctgtttggatccatatgttcttgtggaccgaaagtttcagccctataagcctttttactatattttggacatcacttatgggaaggaagatgttcccctatcctgtgtcaatgagattgacacaacccctccaccccaggtggcctacagcaaggaacgtatcccgggcaagggtgttttcattaacacaggccctgaatttctggttggctgtgactgcaaggatgggtgtcgggacaagtccaagtgtgcctgccatcaactaactatccaggctacagcctgtaccccaggaggccaaatcaaccctaactctggctaccagtacaagagactagaagagtgtctacccacaggggtatatgagtgtaacaaacgctgcaaatgtgacccaaacatgtgcacaaaccggttggtgcaacatggactacaagttcggctacagctattcaagacacagaacaagggctggggtatccgctgcttggatgacattgccaaaggctcttttgtttgtatttatgcaggcaaaatcctgacagatgactttgcagacaaggagggtctggaaatgggtgatgagtactttgcaaatctggaccatatcgagagcgtggagaacttcaaagaaggatatgagagtgatgccccctgttcctctgacagcagtggtgtagacttgaaggaccaggaagatggcaacagcggtacagaggaccctgaagagtccaatgatgatagctcagatgataacttctgtaaggatgaggacttcagcaccagttcagtgtggcggagctatgctacccggaggcagacccggggccagaaagagaacggactctctgagacaacttccaaggactcccaccccccagatcttggacccccacatattcctgttcctccctcaatccctgtaggtggctgcaatccaccttcctccgaagagacacccaagaacaaggtggcctcatggttgagctgcaatagtgtcagtgaaggtggttttgctgactctgatagccattcatccttcaagactaatgaaggtggggagggccgggctgggggaagccgaatggaggctgagaaggcctccacctcaggactaggcatcaaggatgagggagacatcaaacaggccaagaaagaggacactgacgaccgaaacaagatgtcagtagttactgaaagctctcgaaattacggttacaatccttctcctgtgaagcctgaaggacttcgccgcccacctagtaagactagtatgcatcaaagccgaagactcatggcttctgctcagtccaaccctgatgatgtcctgacactgtccagcagcacagaaagtgagggggaaagtgggaccagccgaaagcccactgctggtcagacttcggctacagcggttgacagtgatgatatccagaccatatcctctggctctgaaggggatgactttgaggacaagaagaacatgactggtccaatgaagcgtcaagtggcagtaaaatcaacccgaggctttgctcttaaatcaacccatgggattgcaattaaatcaaccaacatggcctctgtggacaagggggagagcgcacctgttcgtaagaacacacgccaattctatgatggcgaggagtcttgctacatcattgatgccaagcttgaaggcaacctgggccgctacctcaaccacagttgcagccccaacctgtttgtccagaatgtcttcgtggatacccatgatcttcgcttcccctgggtggccttctttgccagcaaaagaatccgggctgggacagaacttacttgggactacaactacgaggtgggcagtgtggaaggcaaggagctactctgttgctgtggggccattgaatgcagaggacgtcttctttagaggacagccttcttcccaacccttcttgaactgtcgtttcctcaggaactgggtcttcctgattgttgaaccctgacccgaagtctctgggctagctactccccccagctcctagttgatagaaatgggggttctggaccagatgatcccttccaatgtggtgctagcaggcaggatcccttctccacctccaaaggccctaaagggtggggagagatcaccactctaacctcggcctgacatccctcccatcccatatttgtccaagtgttcctgcttctaacagactttgttcttagaatggagcctgtgtatctactatctccagtttgtattatttcttgaaagtcttttaacaatatgataaaactaagattgtgaaa

SEQ ID NO: 14 - protein, 1291 aa, Homo sapiens
MSSLPGCIGLDAATATVESEEIAELQQAVVEELGISMEELRHFIDEELEKMDCVQQRKKQLAELETWVIQKESEVAHVDQLFDDASRAVTNCESLVKDFYSKLGLQYRDSSSEDESSRPTEIIEIPDEDDDVLSIDSGDAGSRTPKDQKLREAMAALRKSAQDVQKFMDAVNKKSSSQDLHKGTLSQMSGELSKDGDLIVSMRILGKKRTKTWHKGTLIAIQTVGPGKKYKVKFDNKGKSLLSGNHIAYDYHPPADKLYVGSRVVAKYKDGNQVWLYAGIVAETPNVKNKLRFLIFFDDGYASYVTQSELYPICRPLKKTWEDIEDISCRDFIEEYVTAYPNRPMVLLKSGQLIKTEWEGTWWKSRVEEVDGSLVRILFLDDKRCEWIYRGSTRLEPMFSMKTSSASALEKKQGQLRTRPNMGAVRSKGPVVQYTQDLTGTGTQFKPVEPPQPTAPPAPPFPPAPPLSPQAGDSDLESQLAQSRKQVAKKSTSFRPGSVGSGHSSPTSPALSENVSGGKPGINQTYRSPLGSTASAPAPSALPAPPAPPVFHGMLERAPAEPSYRAPMEKLFYLPHVCSYTCLSRVRPMRNEQYRGKNPLLVPLLYDFRRMTARRRVNRKMGFHVIYKTPCGLCLRTMQEIERYLFETGCDFLFLEMFCLDPYVLVDRKFQPYKPFYYILDITYGKEDVPLSCVNEIDTTPPPQVAYSKERIPGKGVFINTGPEFLVGCDCKDGCRDKSKCACHQLTIQATACTPGGQINPNSGYQYKRLEECLPTGVYECNKRCKCDPNMCTNRLVQHGLQVRLQLFKTQNKGWGIRCLDDIAKGSFVCIYAGKILTDDFADKEGLEMGDEYFANLDHIESVENFKEGYESDAPCSSDSSGVDLKDQEDGNSGTEDPEESNDDSSDDNFCKDEDFSTSSVWRSYATRRQTRGQKENGLSETTSKDSHPPDLGPPHIPVPPSIPVGGCNPPSSEETPKNKVASWLSCNSVSEGGFADSDSHSSFKTNEGGEGRAGGSRMEAEKASTSGLGIKDEGDIKQAKKEDTDDRNKMSVVTESSRNYGYNPSPVKPEGLRRPPSKTSMHQSRRLMASAQSNPDDVLTLSSSTESEGESGTSRKPTAGQTSATAVDSDDIQTISSGSEGDDFEDKKNMTGPMKRQVAVKSTRGFALKSTHGIAIKSTNMASVDKGESAPVRKNTRQFYDGEESCYIIDAKLEGNLGRYLNHSCSPNLFVQNVFVDTHDLRFPWVAFFASKRIRAGTELTWDYNYEVGSVEGKELLCCCGAIECRGRLL

SEQ ID NO: 15 - DNA, 4395 bp, Homo sapiens
  CDS (339)..(3077)
gcagtgggctctggcggaggtcgggagaactgcagggcgaaggccgccgggggctccgcgggctgcggggggaggcacttgacaccggcccggggagaggaggggccgctgtccctgcggccagtgctggatgcggggacccagcgcagaagcagcgccaggtggagccatcgaagcccccacccacaggctgacagaggcaccgttcaccagagggctcaacaccgggatctatgtttaagttttaactctcgcctccaaagaccacgataattccttccccaaagcccagcagccccccagccccgcgcagccccagcctgcctcccggcgcccagatgcccgccatgccctccagcggccccggggacaccagcagctctgctgcggagcgggaggaggaccgaaaggacggagaggagcaggaggagccgcgtggcaaggaggagcgccaagagcccagcaccacggcacggaaggtggggcggcctgggaggaagcgcaagcaccccccggtggaaagcggtgacacgccaaaggaccctgcggtgatctccaagtccccatccatggcccaggactcaggcgcctcagagctattacccaatggggacttggagaagcggagtgagccccagccagaggaggggagccctgctggggggcagaagggcggggccccagcagagggagagggtgcagctgagaccctgcctgaagcctcaagagcagtggaaaatggctgctgcacccccaaggagggccgaggagcccctgcagaagcgggcaaagaacagaaggagaccaacatcgaatccatgaaaatggagggctcccggggccggctgcggggtggcttgggctgggagtccagcctccgtcagcggcccatgccgaggctcaccttccaggcgggggacccctactacatcagcaagcgcaagcgggacgagtggctggcacgctggaaaagggaggctgagaagaaagccaaggtcattgcaggaatgaatgctgtggaagaaaaccaggggcccggggagtctcagaaggtggaggaggccagccctcctgctgtgcagcagcccactgaccccgcatcccccactgtggctaccacgcctgagcccgtggggtccgatgctggggacaagaatgccaccaaagcaggcgatgacgagccagagtacgaggacggccggggctttggcattggggagctggtgtgggggaaactgcggggcttctcctggtggccaggccgcattgtgtcttggtggatgacgggccggagccgagcagctgaaggcacccgctgggtcatgtggttcggagacggcaaattctcagtggtgtgtgttgagaagctgatgccgctgagctcgttttgcagtgcgttccaccaggccacgtacaacaagcagcccatgtaccgcaaagccatctacgaggtcctgcaggtggccagcagccgcgcggggaagctgttcccggtgtgccacgacagcgatgagagtgacactgccaaggccgtggaggtgcagaacaagcccatgattgaatgggccctggggggcttccagccttctggccctaagggcctggagccaccagaagaagagaagaatccctacaaagaagtgtacacggacatgtgggtggaacctgaggcagctgcctacgcaccacctccaccagccaaaaagccccggaagagcacagcggagaagcccaaggtcaaggagattattgatgagcgcacaagagagcggctggtgtacgaggtgcggcagaagtgccggaacattgaggacatctgcatctcctgtgggagcctcaatgttaccctggaacaccccctcttcgttggaggaatgtgccaaaactgcaagaactgctttctggagtgtgcgtaccagtacgacgacgacggctaccagtcctactgcaccatctgctgtgggggccgtgaggtgctcatgtgcggaaacaacaactgctgcaggtgcttttgcgtggagtgtgtggacctcttggtggggccgggggctgcccaggcagccattaaggaagacccctggaactgctacatgtgcgggcacaagggtacctacgggctgctgcggcggcgagaggactggccctcccggctccagatgttcttcgctaataaccacgaccaggaatttgaccctccaaaggtttacccacctgtcccagctgagaagaggaagcccatccgggtgctgtctctctttgatggaatcgctacagggctcctggtgctgaaggacttgggcattcaggtggaccgctacattgcctcggaggtgtgtgaggactccatcacggtgggcatggtgcggcaccaggggaagatcatgtacgtcggggacgtccgcagcgtcacacagaagcatatccaggagtggggcccattcgatctggtgattgggggcagtccctgcaatgacctctccatcgtcaaccctgctcgcaagggcctctacgagggcactggccggctcttctttgagttctaccgcctcctgcatgatgcgcggcccaaggagggagatgatcgccccttcttctggctctttgagaatgtggtggccatgggcgttagtgacaagagggacatctcgcgatttctcgagtccaaccctgtgatgattgatgccaaagaagtgtcagctgcacacagggcccgctacttctggggtaaccttcccggtatgaacaggccgttggcatccactgtgaatgataagctggagctgcaggagtgtctggagcatggcaggatagccaagttcagcaaagtgaggaccattactacgaggtcaaactccataaagcagggcaaagaccagcattttcctgtcttcatgaatgagaaagaggacatcttatggtgcactgaaatggaaagggtatttggtttcccagtccactatactgacgtctccaacatgagccgcttggcgaggcagagactgctgggccggtcatggagcgtgccagtcatccgccacctcttcgctccgctgaaggagtattttgcgtgtgtgtaagggacatgggggcaaactgaggtagcgacacaaagttaaacaaacaaacaaaaaacacaaaacataataaaacaccaagaacatgaggatggagagaagtatcagcacccagaagagaaaaaggaatttaaaacaaaaaccacagaggcggaaataccggagggctttgccttgcgaaaagggttggacatcatctcctgatttttcaatgttattcttcagtcctatttaaaaacaaaaccaagctcccttcccttcctcccccttcccttttttttcggtcagaccttttattttctactcttttcagaggggttttctgtttgtttgggttttgtttcttgctgtgactgaaacaagaaggttattgcagcaaaaatcagtaacaaaaaatagtaacaataccttgcagaggaaaggtgggagagaggaaaaaaggaaattctatagaaatctatatattgggttgtttttttttttgttttttgttttttttttttgggtttttttttttactatatatcttttttttgttgtctctagcctgatcagataggagcacaagcaggggacggaaagagagagacactcaggcggcagcattccctcccagccactgagctgtcgtgccagcaccattcctggtcacgcaaaacagaacccagttagcagcagggagacgagaacaccacacaagacatttttctacagtatttcaggtgcctaccacacaggaaaccttgaagaaaatcagtttctagaagccgctgttacctcttgtttacagtttatatatatatgatagatatgagatatatatataaaaggtactgttaactactgtacaacccgacttcataatggtgctttcaaacagcgagatgagtaaaaacatcagcttccacgttgccttctgcgcaaagggtttcaccaaggatggagaaagggagacagcttgcagatggcgcgttctcacggtgggctcttccccttggtttgtaacgaagtgaaggaggagaacttgggagccaggttctccctgccaaaaagggggctagatgaggtggtcgggcccgtggacagctgagagtgggattcatccagactcatgcaataaccctttgattgttttctaaaaggagactccctcggcaagatggcagagggtacggagtcttcaggcccagtttctcactttagccaattcgagggctccttgtggtgggatcagaactaatccagagtgtgggaaagtgacagtcaaaaccccacctggagcaaataaaaaaacatacaaaacgtaaaaaaaaaaaaaaaa

SEQ ID NO: 16 - protein, 912 aa, Homo sapiens
MPAMPSSGPGDTSSSAAEREEDRKDGEEQEEPRGKEERQEPSTTARKVGRPGRKRKHPPVESGDTPKDPAVISKSPSMAQDSGASELLPNGDLEKRSEPQPEEGSPAGGQKGGAPAEGEGAAETLPEASRAVENGCCTPKEGRGAPAEAGKEQKETNIESMKMEGSRGRLRGGLGWESSLRQRPMPRLTFQAGDPYYISKRKRDEWLARWKREAEKKAKVIAGMNAVEENQGPGESQKVEEASPPAVQQPTDPASPTVATTPEPVGSDAGDKNATKAGDDEPEYEDGRGFGIGELVWGKLRGFSWWPGRIVSWWMTGRSRAAEGTRWVMWFGDGKFSVVCVEKLMPLSSFCSAFHQATYNKQPMYRKAIYEVLQVASSRAGKLFPVCHDSDESDTAKAVEVQNKPMIEWALGGFQPSGPKGLEPPEEEKNPYKEVYTDMWVEPEAAAYAPPPPAKKPRKSTAEKPKVKEIIDERTRERLVYEVRQKCRNIEDICISCGSLNVTLEHPLFVGGMCQNCKNCFLECAYQYDDDGYQSYCTICCGGREVLMCGNNNCCRCFCVECVDLLVGPGAAQAAIKEDPWNCYMCGHKGTYGLLRRREDWPSRLQMFFANNHDQEFDPPKVYPPVPAEKRKPIRVLSLFDGIATGLLVLKDLGIQVDRYIASEVCEDSITVGMVRHQGKIMYVGDVRSVTQKHIQEWGPFDLVIGGSPCNDLSIVNPARKGLYEGTGRLFFEFYRLLHDARPKEGDDRPFFWLFENVVAMGVSDKRDISRFLESNPVMIDAKEVSAAHRARYFWGNLPGMNRPLASTVNDKLELQECLEHGRIAKFSKVRTITTRSNSIKQGKDQHFPVFMNEKEDILWCTEMERVFGFPVHYTDVSNMSRLARQRLLGRSWSVPVIRHLFAPLKEYFACV

SEQ ID NO: 17 - DNA, 1744 bp, Homo sapiens
  CDS (195)..(1415)
cagcgcccgggccatggcggcggcggtggcgggagctgctgtctgagcagcggttgcggaccgagcgaacttggcccaggagcccgggcctagggagaggcgcggcggcggcgggagcgcgaacggctggagctggccttcttcgccttctcctcggctgtggagccctggtggggggtctgcgcccggtcaccatgacgacgccggcgaatgcccagaatgccagcaaaacgtgggaactgagtctgtatgagctgcaccggaccccgcaggaagccataatggatggcacagagattgctgtttcccctcggtcactgcattcagaactcatgtgccctatctgcctggacatgctgaagaatacgatgaccaccaaggagtgcctccacagattctgctctgactgcattgtcacagccctacggagcgggaacaaggagtgtcctacctgccgaaagaagctggtgtccaagcgatccctacggccagaccccaactttgatgccctgatctctaagatctatcctagccgggaggaatacgaggcccatcaagaccgagtgcttatccgcctgagccgcctgcacaaccagcaggcattgagctccagcattgaggaggggctacgcatgcaggccatgcacagggcccagcgtgtgaggcggccgataccagggtcagatcagaccacaacgatgagtgggggggaaggagagcccggggagggagaaggggatggagaagatgtgagctcagactccgcccctgactctgccccaggccctgctcccaagcgaccccgtggagggggcgcaggggggagcagtgtagggacagggggaggcggcactggtggggtgggtgggggtgccggttcggaagactctggtgaccggggagggactctgggagggggaacgctgggccccccaagccctcctggggcccccagccccccagagccaggtggagaaattgagctcgtgttccggccccaccccctgctcgtggagaagggagaatactgccagacgaggtatgtgaagacaactgggaatgccacagtggaccacctctccaagtacttggccctgcgcattgccctcgagcggaggcaacagcaggaagcaggggagccaggagggcctggagggggcgcctctgacaccggaggacctgatgggtgtggcggggagggtgggggtgccggaggaggtgacggtcctgaggagcctgctttgcccagcctggagggcgtcagtgaaaagcagtacaccatctacatcgcacctggaggcggggcgttcacgacgttgaatggctcgctgaccctggagctggtgaatgagaaattctggaaggtgtcccggccactggagctgtgctatgctcccaccaaggatccaaagtgaccccaccaggggacagccagaggaaggggaccatggggtatccctgtgtcctggtctatcaccccagcttctttgtcccccagtacccccagcccagccagccaataagaggacacaaatgaggacacgtggcttttatacaaagtatctatatgagattcttctatattgtacagagtggggcaaaacacgcccccatctgctgccttttctattgccctgcaacgtcccatctatacgaggtgttggagaaggtgaagaaccctcccattcacgcccgcctaccaacaacaaacgtgcttttttcctctttgaaacctgcaaaaaaa

SEQ ID NO: 18 - protein, 406 aa, Homo sapiens
MTTPANAQNASKTWELSLYELHRTPQEAIMDGTEIAVSPRSLHSELMCPICLDMLKNTMTTKECLHRFCSDCIVTALRSGNKECPTCRKKLVSKRSLRPDPNFDALISKIYPSREEYEAHQDRVLIRLSRLHNQQALSSSIEEGLRMQAMHRAQRVRRPIPGSDQTTTMSGGEGEPGEGEGDGEDVSSDSAPDSAPGPAPKRPRGGGAGGSSVGTGGGGTGGVGGGAGSEDSGDRGGTLGGGTLGPPSPPGAPSPPEPGGEIELVFRPHPLLVEKGEYCQTRYVKTTGNATVDHLSKYLALRIALERRQQQEAGEPGGPGGGASDTGGPDGCGGEGGGAGGGDGPEEPALPSLEGVSEKQYTIYIAPGGGAFTTLNGSLTLELVNEKFWKVSRPLELCYAPTKDPK

SEQ ID NO: 19 - DNA, 3873 bp, Homo sapiens
  CDS (55)..(2631)
catctgcctgcccttctgccatccgagcgccctgactgcgccacactgcaggccatggagaatgagctgccagtcccacatacatctagcagtgcctgtgccaccagcagtaccagcggggccagtagcagcagtggctgcaacaacagcagcagtggtggaagtggccgccccaccgggccccagatttctgtgtacagtggtattccagaccggcagaccgtgcaggtgatccagcaggccctgcacagacagcccagcacggccgctcagtacctgcagcagatgtacgccgcccagcagcagcacctcatgctgcagaccgcggcgctccagcagcagcacctcagcagcgcccagctccagagcctggcagccgtacagcaggcaagcctggtatccaatagacaaggaagcacttcaggcagcaatgtgtctgcgcaggccccggcccagtcatcttcgatcaacctggcagcctccccagcagcagcccagctcctcaaccgggcccagagtgtgaactctgcagcagcctcaggcatcgctcagcaggctgtgctcttgggcaacacgtcttccccagccctgactgcaagccaagcacagatgtatctgagggcacagatgctcatcttcacgcccacggccaccgtcgctactgtgcagcctgagctcggcactggctcccccgcccggccccccacccccgcccaggtacagaacttgaccctccgaacacagcagacaccagcggcagcagcctcgggccccacccccactcagcctgtcctgcccagcttggccctgaaacccacgccgggcggtagccagcctctgcctaccccagcacagagcagaaatactgctcaggcttcccctgcaggtgccaagcctggcatagctgacagtgtgatggagccacacaagaaaggagatggcaacagcagtgtgccagggagcatggaaggccgggctgggctcagccggacggttcctgctgtggctgcccaccccctcattgcaccagcctatgctcagctgcagccacaccagctcctcccacagccatcctcaaagcacctgcagccccaatttgtgatccagcagcagccacagccacaacagcagcagccgccgccccagcagtcacggcctgtgctccaagctgagccccacccccagctcgcctcagtctctccaagcgtggccctccagcccagctcagaggcccatgccatgccactaggcccggttacacccgccctgccactccagtgtcccactgccaacctgcacaagcctggcggcagtcagcagtgtcaccctcccacacctgatactgggcctcagaatggacatcccgagggcgtgccccacacccctcaacgcaggttccagcacacttcagctgtcatcttacaactgcagcctgcttcaccaccccagcagtgtgtccctgatgactggaaagaagtggcaccaggggagaaaagtgtgcctgagacgcggtctggcccatcaccacatcagcaggctattgtcactgccatgcctggtggcctgcctgtacccacgagccctaacatccagccgtccccagctcacgagacagggcagggcattgttcatgcactgaccgacctcagcagccccggcatgacctcagggaacggaaactctgcctccagcatcgccggcactgccccccagaatggtgagaataaaccaccacaggccattgtgaaaccccaaatcctgacgcatgttatcgaagggtttgtgatccaggagggggcggagcctttcccggtgggacgctcgtccctgctggtggggaatctcaagaagaagtatgcacaggggttcctgcctgagaaacttccacagcaggatcacaccaccaccactgactcggagatggaggagccctatctgcaagaatccaaagaggagggtgctcccctcaaactcaagtgtgagctctgtggccgggtggactttgcctataagttcaagcgttccaagcgcttctgttccatggcttgtgcaaagaggtacaacgtgggatgcaccaaacgggtgggacttttccactcagaccggagcaagctgcagaaggcaggagctgcgacccacaaccgccgtcgggccagcaaagccagtctgccaccacttaccaaggataccaagaagcagccaacaggcactgtgcccctttcggttactgctgctttgcagctaacacacagccaggaagactccagccgttgctcagataactcaagctatgaggaacccttgtcacccatctcagccagctcatctacttcccgccggcgacaaggccagcgggacctggagctccccgacatgcatatgcgggacctggtgggcatgggacaccacttcctgccaagtgagcccaccaagtggaatgtagaagacgtctacgaattcatccgctctctgccaggctgccaggagatagcagaggaattccgtgcccaggaaatcgacgggcaagccctgctgctgctcaaggaggaccacctgatgagcgccatgaacatcaagctggggcccgccctgaagatctacgcccgcatcagcatgctcaaggactcctagggctggtggcagccaggattctggcccagggcgcctcctcccgactgagcagagccagacagacattcctgaggggcccagaaatggggccggttggagggcaggggctctccctaggggcatagctggtgaggaggtctgggcacctcctccatggctctcaggggcctttcatttctgtgggaggggcagagaggtaggtggcacagaagatggggctttatgcttgtaaatattgatagcactggcttcctccaaagtcccaatactctagccccgctctcttcccctctttctgtcccccattttccagggggtatatggtcagggctccccaacctgagttgggttacttcaagggcagccagcaggcctggatggaggcctagaaagcccttgccttccttcctcccacttctttctccaggcctggttaactcttccgttgtcagcttctcccccttcagcctgtttctgcagcagccagggttctcccccctacaccctctgcaggtggagagagagaagctgggcccagccgggccgtgcctgctggcacagacgccttaacgctgtgtgtatgactgtgtgactgtgtgggagcctggactgacagataggccaagggctactctctggcatctccaggtgttttgtagcaaacagccacttagtgctttgtcctggactccactcagcctcaggatggggaatagccaagaatggcagcctcagcgcagaggcaaggtcagaaagagacggcgcttcagagtttcctttccagacacccctccccgcactgtgaagttcccctgaccgccctcctggttcacaaagagcattaagaaagctgcggtggtctgagcaacatagcccaaagggctgagcctcctggcctgcctgcccgcccaccctgggagtcccagtggtgaggctcagagaactgctaaggggaaagaacagctggagtttctgttgatgtgaagaaggcagctcttggcctcccactcccacacttctttgcctataaatcttcctagcagcaatttgagctacctgaggaggaggcagggcagaaagggcgagggcctgcctctgacctgccgtgtcctttgcaggaaggaggtaggcacctttctgagcttattctattccccacccacacccccaggcagggttggaaatgaaggacttttttaacctttgttttgttttttaaaaataaatctgtaaaatctgtct

SEQ ID NO: 20 - protein, 858 aa, Homo sapiens
MENELPVPHTSSSACATSSTSGASSSSGCNNSSSGGSGRPTGPQISVYSGIPDRQTVQVIQQALHRQPSTAAQYLQQMYAAQQQHLMLQTAALQQQHLSSAQLQSLAAVQQASLVSNRQGSTSGSNVSAQAPAQSSSINLAASPAAAQLLNRAQSVNSAAASGIAQQAVLLGNTSSPALTASQAQMYLRAQMLIFTPTATVATVQPELGTGSPARPPTPAQVQNLTLRTQQTPAAAASGPTPTQPVLPSLALKPTPGGSQPLPTPAQSRNTAQASPAGAKPGIADSVMEPHKKGDGNSSVPGSMEGRAGLSRTVPAVAAHPLIAPAYAQLQPHQLLPQPSSKHLQPQFVIQQQPQPQQQQPPPQQSRPVLQAEPHPQLASVSPSVALQPSSEAHAMPLGPVTPALPLQCPTANLHKPGGSQQCHPPTPDTGPQNGHPEGVPHTPQRRFQHTSAVILQLQPASPPQQCVPDDWKEVAPGEKSVPETRSGPSPHQQAIVTAMPGGLPVPTSPNIQPSPAHETGQGIVHALTDLSSPGMTSGNGNSASSIAGTAPQNGENKPPQAIVKPQILTHVIEGFVIQEGAEPFPVGRSSLLVGNLKKKYAQGFLPEKLPQQDHTTTTDSEMEEPYLQESKEEGAPLKLKCELCGRVDFAYKFKRSKRFCSMACAKRYNVGCTKRVGLFHSDRSKLQKAGAATHNRRRASKASLPPLTKDTKKQPTGTVPLSVTAALQLTHSQEDSSRCSDNSSYEEPLSPISASSSTSRRRQGQRDLELPDMHMRDLVGMGHHFLPSEPTKWNVEDVYEFIRSLPGCQEIAEEFRAQEIDGQALLLLKEDHLMSAMNIKLGPALKIYARISMLKDS

SEQ ID NO: 21 - DNA, 3344 bp, Homo sapiens
  CDS (101)..(2971)
gcggcagcagcggcgcgggcgggagggcgaagagcagcggccgcctgaggggagcccgcgcctccgccgcctgagaggaggtcgagctgccgccggggcgatgctggaggagctggagtgcggggcgcccggcgccaggggagccgccacagccatggattgcaaagatagaccagcttttccagttaagaagttaatacaagcccgtctgccgtttaagcgcctgaatcttgtcccaaaggggaaagccgatgacatgtcagacgatcagggtacttctgtgcaaagtaaaagccccgatttagaggcctctttggacaccttggaaaacaactgtcatgtgggttctgacatagactttagaccgaaacttgtcaacgggaagggtcccttagataactttttaagaaatagaatcgaaaccagtattggccagagcacagtcatcattgatttgacagaggactcgaatgagcagccagacagtcttgtggaccacaataaactaaattctgaagcctctccctccagggaggcaataaatggccagcgagaagacactggggatcagcaggggttgttgaaggccattcagaacgacaagttggcatttcctggagagaccctttcagacattccttgcaaaacagaggaggagggtgttggctgtggaggtgcagggaggagaggcgactcccaggaatgttcgccacggagctgcccggagctgacgagtggcccgagaatgtgccccagaaaggagcaggacagttggagtgaagctgggggcatcctgttcaaagggaaggtgcctatggtggtcttgcaggacatcttggctgtgagaccaccgcaaatcaagtcccttccagccacaccccaaggcaagaacatgacccctgagagtgaggtgctggaatctttccccgaagaagactctgtactcagccattcgtccctgagctctccctcttccaccagctcgcccgaggggccgcctgctcccccaaagcagcacagcagtaccagtcccttccccacctccacgcccctccgcagaataactaagaaattcgtcaaaggctctacagagaagaacaagctcagactgcaaagagatcaggagcgtctgggcaagcagctcaagttacgtgcagaaagggaagaaaaggagaagctgaaagaggaggccaagcgggccaaggaggaggccaagaagaagaaggaggaagagaaggagcttaaggaaaaggagaggcgggagaagcgggagaaggatgagaaggagaaggcggagaagcagcggctcaaggaggagcggcgcaaggagagacaggaagccctggaggctaaacttgaggaaaaaaggaaaaaggaagaagagaaacggttaagagaagaagagaagcgcattaaagcagagaaggccgaaatcacgaggttcttccagaaaccaaagactccacaggcccccaagaccctggccggctcctgtgggaagtttgccccctttgaaattaaagagcacatggtcctggcccctcggcgtcggaccgctttccatccagacctctgcagtcagctggaccagctcctccagcagcagagcggcgagttctccttcttgaaagacctcaaaggccggcagcccctgaggtccggacccacgcacgtttccacccggaatgcagatatttttaacagtgatgtcgtcatcgtggagcgtgggaagggcgacggtgttcccgagaggaggaagtttggcaggatgaagctcctgcagttctgtgagaaccaccggcctgcctactggggtacctggaataagaagacggcactcatccgcgcgcgagacccctgggcccaggacacgaagctcctggactatgaggtggacagtgatgaggagtgggaagaagaggagcctggggagtccctgtcccacagtgagggggatgatgatgacgacatgggagaggatgaagatgaggacgatggtttctttgtgccccatgggtacctgtctgaggacgaaggtgtgacagaggagtgtgccgaccctgagaaccataaggtccgccagaaactgaaggccaaggagtgggacgagttcctggctaaggggaagcgctttcgcgtcctgcaacctgtgaagatcggctgcgtgtgggcggctgacagagactgcgcaggcgatgacctgaaggtactgcagcagttcgcagcctgcttcctggagaccctgccggcccaggaggagcagacgcccaaggcctccaagcgggagaggagagacgagcagatcctggcccagctgctgccgctcctgcacggcaatgtgaacgggagcaaggtcatcatccgggagttccaggagcactgccgccggggactgctcagcaaccacaccggcagcccgcggagcccctccaccacctacctgcacacccccacccccagcgaggatgccgccatcccctctaagtcccggctcaagcggctcatttccgagaactcagtgtatgagaagcggcctgacttcaggatgtgctggtacgtgcacccgcaggtgctacagagcttccagcaggagcacctgcccgtgccgtgccagtggagctatgtgacatcggtgccctcggcccccaaagaggacagtggcagcgtcccctccacggggcccagccagggcactcccatctcgctgaagaggaagtcagcgggcagcatgtgcatcacccaattcatgaagaagcgcaggcacgacggccagattggtgctgaagacatggacggcttccaggcagacacggaggaggaggaagaggaggagggcgactgtatgatcgtggatgtcccggatgctgcggaggtccaagccccgtgtggagccgcttccggagctgggggtggtgtgggggtggacaccggcaaggccaccctgaccgcgagcccactgggtgcatcctgagagcaggggtgacgtatgtagaatgcttagggtgtcctccccacagagcagatacttgaaccgactcaattcctgtgtaaagagcactttgtcctgcttcacggacctccccaaagtgtgcagagttctatataggatgctggattagttcctttgatatttgtaaaaattcccccaagagccgcatatgaatctgccctttaataaagcattattgagattgctggcctattggggaagcctgcgggcacaggagcaggcgtggaatccaatacttgtaaatgaattgaagcgtcaggaccacccgcctggccacgtgcgcgggcccctggacctaacgaggcagtgtataaacttattctctagccctgaa

SEQ ID NO: 22 - protein, 956 aa, Homo sapiens
MLEELECGAPGARGAATAMDCKDRPAFPVKKLIQARLPFKRLNLVPKGKADDMSDDQGTSVQSKSPDLEASLDTLENNCHVGSDIDFRPKLVNGKGPLDNFLRNRIETSIGQSTVIIDLTEDSNEQPDSLVDHNKLNSEASPSREAINGQREDTGDQQGLLKAIQNDKLAFPGETLSDIPCKTEEEGVGCGGAGRRGDSQECSPRSCPELTSGPRMCPRKEQDSWSEAGGILFKGKVPMVVLQDILAVRPPQIKSLPATPQGKNMTPESEVLESFPEEDSVLSHSSLSSPSSTSSPEGPPAPPKQHSSTSPFPTSTPLRRITKKFVKGSTEKNKLRLQRDQERLGKQLKLRAEREEKEKLKEEAKRAKEEAKKKKEEEKELKEKERREKREKDEKEKAEKQRLKEERRKERQEALEAKLEEKRKKEEEKRLREEEKRIKAEKAEITRFFQKPKTPQAPKTLAGSCGKFAPFEIKEHMVLAPRRRTAFHPDLCSQLDQLLQQQSGEFSFLKDLKGRQPLRSGPTHVSTRNADIFNSDVVIVERGKGDGVPERRKFGRMKLLQFCENHRPAYWGTWNKKTALIRARDPWAQDTKLLDYEVDSDEEWEEEEPGESLSHSEGDDDDDMGEDEDEDDGFFVPHGYLSEDEGVTEECADPENHKVRQKLKAKEWDEFLAKGKRFRVLQPVKIGCVWAADRDCAGDDLKVLQQFAACFLETLPAQEEQTPKASKRERRDEQILAQLLPLLHGNVNGSKVIIREFQEHCRRGLLSNHTGSPRSPSTTYLHTPTPSEDAAIPSKSRLKRLISENSVYEKRPDFRMCWYVHPQVLQSFQQEHLPVPCQWSYVTSVPSAPKEDSGSVPSTGPSQGTPISLKRKSAGSMCITQFMKKRRHDGQIGAEDMDGFQADTEEEEEEEGDCMIVDVPDAAEVQAPCGAASGAGGGVGVDTGKATLTASPLGAS

SEQ ID NO: 23 - DNA, 4007 bp, Homo sapiens
  CDS (216)..(3368)
gacagataccctccttccggccgcgccactcgggaggcggatcccgtgggcctgaggaggcttcccccgcccggtttgctttccctccctcgctggcgctgccgcgagtccaccgagcggcctctgaggagcagccgcaggaggaggaggaggtcgtcgggggcggcgggcggagaccgcgctctcgcttccccggcggcggcaagggcaggacaatggaggtggcggtggagaaggcggtggcggcggcggcagcggcctcggctgcggcctccggggggccctcggcggcgccgagcggggagaacgaggccgagagtcggcagggcccggactcggagcgcggcggcgaggcggcccggctcaacctgttggacacttgcgccgtgtgccaccagaacatccagagccgggcgcccaagctgctgccctgcctgcactctttctgccagcgctgcctgcccgcgccccagcgctacctcatgctgcccgcgcccatgctgggctcggccgagaccccgccacccgtccctgcccccggctcgccggtcagcggctcgtcgccgttcgccacccaagttggagtcattcgttgcccagtttgcagccaagaatgtgcagagagacacatcatagataacttttttgtgaaggacactactgaggttcccagcagtacagtagaaaagtcaaatcaggtatgtacaagctgtgaggacaacgcagaagccaatgggttttgtgtagagtgtgttgaatggctctgcaagacgtgtatcagagctcatcagagggtaaagttcacaaaagaccacactgtcagacagaaagaggaagtatctccagaggcagttggtgtcaccagccagcgaccagtgttttgtccttttcataaaaaggagcagctgaagctgtactgtgagacatgtgacaaactgacatgtcgagactgtcagttgttagaacataaagagcatagataccaatttatagaagaagcttttcagaatcagaaagtgatcatagatacactaatcaccaaactgatggaaaaaacaaaatacataaaattcacaggaaatcagatccaaaacagaattattgaagtaaatcaaaatcaaaagcaggtggaacaggatattaaagttgctatatttacactgatggtagaaataaataaaaaaggaaaagctctactgcatcagttagagagccttgcaaaggaccatcgcatgaaacttatgcaacaacaacaggaagtggctggactctctaaacaattggagcatgtcatgcatttttctaaatgggcagtttccagtggcagcagtacagcattactttatagcaaacgactgattacataccggttacggcacctccttcgtgcaaggtgtgatgcatccccagtgaccaacaacaccatccaatttcactgtgatcctagtttctgggctcaaaatatcatcaacttaggttctttagtaatcgaggataaagagagccagccacaaatgcctaagcagaatcctgtcgtggaacagaattcacagccaccaagtggtttatcatcaaaccagttatccaagttcccaacacagatcagcctagctcaattacggctccagcatatgcagcaacaggtaatggctcagaggcaacaggtgcaacggaggccagcacctgtgggtttaccaaaccctagaatgcaggggcccatccagcaaccttccatctctcatcagcaaccgcctccacgtttgataaactttcagaatcacagccccaaacccaatggaccagttcttcctcctcatcctcaacaactgagatatccaccaaaccagaacataccacgacaagcaataaagccaaaccccctacagatggctttcttggctcaacaagccataaaacagtggcagatcagcagtggacagggaaccccatcaactaccaacagcacatcctctactccttccagccccacgattactagtgcagcaggatatgatggaaaggcttttggttcacctatgatcgatttgagctcaccagtgggagggtcttataatcttccctctcttccggatattgactgttcaagtactattatgctggacaatattgtgaggaaagatactaatatagatcatggccagccaagaccaccctcaaacagaacggtccagtcaccaaattcatcagtgccatctccaggccttgcaggacctgttactatgactagtgtacaccccccaatacgttcacctagtgcctccagcgttggaagccgaggaagctctggctcttccagcaaaccagcaggagctgactctacacacaaagtcccagtggtcatgctggagccaattcgaataaaacaagaaaacagtggaccaccggaaaattatgatttccctgttgttatagtgaagcaagaatcagatgaagaatctaggcctcaaaatgccaattatccaagaagcatactcacctccctgctcttaaatagcagtcagagctctacttctgaggagactgtgctaagatcagatgcccctgatagtacaggagatcaacctggacttcaccaggacaattcctcaaatggaaagtctgaatggttggatccttcccagaagtcacctcttcatgttggagagacaaggaaagaggatgaccccaatgaggactggtgtgcagtttgtcaaaacggaggggaactcctctgctgtgaaaagtgccccaaagtattccatctttcttgtcatgtgcccacattgacaaattttccaagtggagagtggatttgcactttctgccgagacttatctaaaccagaagttgaatatgattgtgatgctcccagtcacaactcagaaaaaaagaaaactgaaggccttgttaagttaacacctatagataaaaggaagtgtgagcgcctacttttatttctttactgccatgaaatgagcctggcttttcaagaccctgttcctctaactgtgcctgattattacaaaataattaaaaatccaatggatttgtcaaccatcaagaaaagactacaagaagattattccatgtactcaaaacctgaagattttgtagctgattttagattgatctttcaaaactgtgctgaattcaatgagcctgattcagaagtagccaatgctggtataaaacttgaaaattattttgaagaacttctaaagaacctctatccagaaaaaaggtttcccaaaccagaattcaggaatgaatcagaagataataaatttagtgatgattcagatgatgactttgtacagccccggaagaaacgcctcaaaagcattgaagaacgccagttgcttaaataatatgcagcaccactagcttgtgctggtttttagatttttttgttttcaaaaaaacatttgtcagtaatttaacatcactacaaaaagaagagtttgtgactattctcatctctgttttggacgtttactagactttgatttccttaatagcccatttctgttaacctcttatcactaagaaagaaaggaaagaaggagatgaatagaagaaagaaaatggaaagaaggaaaaaaggaggatagaaaaaggatggaagaaagaagcattgaaaacaaagacattcttcccacttcttggatttttaaaccacagtctggagtgatagctactgtagaaaggaaatagactttgtatgaactctttaagttgaaaagtaaaaaatatatgtggtttggatgtgtgctttaattcagctttagaaattaataccactacccgtgaattatatggcctgacaatatgaattaggtgtactgtactgaagaacagtactccacaaacatgggtggtaacaagagttccatcccaggaggccaaacggtgcaacagaagggtaggttagatgctattaagaaggcacttaatagtacatcatgtaagatggcaactgtattaaagaaaaatccggaaaacaaaaa

SEQ ID NO: 24 - protein, 1050 aa, Homo sapiens
MEVAVEKAVAAAAAASAAASGGPSAAPSGENEAESRQGPDSERGGEAARLNLLDTCAVCHQNIQSRAPKLLPCLHSFCQRCLPAPQRYLMLPAPMLGSAETPPPVPAPGSPVSGSSPFATQVGVIRCPVCSQECAERHIIDNFFVKDTTEVPSSTVEKSNQVCTSCEDNAEANGFCVECVEWLCKTCIRAHQRVKFTKDHTVRQKEEVSPEAVGVTSQRPVFCPFHKKEQLKLYCETCDKLTCRDCQLLEHKEHRYQFIEEAFQNQKVIIDTLITKLMEKTKYIKFTGNQIQNRIIEVNQNQKQVEQDIKVAIFTLMVEINKKGKALLHQLESLAKDHRMKLMQQQQEVAGLSKQLEHVMHFSKWAVSSGSSTALLYSKRLITYRLRHLLRARCDASPVTNNTIQFHCDPSFWAQNIINLGSLVIEDKESQPQMPKQNPVVEQNSQPPSGLSSNQLSKFPTQISLAQLRLQHMQQQVMAQRQQVQRRPAPVGLPNPRMQGPIQQPSISHQQPPPRLINFQNHSPKPNGPVLPPHPQQLRYPPNQNIPRQAIKPNPLQMAFLAQQAIKQWQISSGQGTPSTTNSTSSTPSSPTITSAAGYDGKAFGSPMIDLSSPVGGSYNLPSLPDIDCSSTIMLDNIVRKDTNIDHGQPRPPSNRTVQSPNSSVPSPGLAGPVTMTSVHPPIRSPSASSVGSRGSSGSSSKPAGADSTHKVPVVMLEPIRIKQENSGPPENYDFPVVIVKQESDEESRPQNANYPRSILTSLLLNSSQSSTSEETVLRSDAPDSTGDQPGLHQDNSSNGKSEWLDPSQKSPLHVGETRKEDDPNEDWCAVCQNGGELLCCEKCPKVFHLSCHVPTLTNFPSGEWICTFCRDLSKPEVEYDCDAPSHNSEKKKTEGLVKLTPIDKRKCERLLLFLYCHEMSLAFQDPVPLTVPDYYKIIKNPMDLSTIKKRLQEDYSMYSKPEDFVADFRLIFQNCAEFNEPDSEVANAGIKLENYFEELLKNLYPEKRFPKPEFRNESEDNKFSDDSDDDFVQPRKKRLKSIEERQLLK

SEQ ID NO: 25 - DNA, 8339 bp, Homo sapiens
  CDS (85)..(3468)
ctgcggctggggctgggggcggcggcggcggcgacgcgggcggcgggcggcgcggggcggtccggcgggttcaaagaggaaaacatggcggaaaacaaaggcggcggcgaggctgagagcggcggcgggggcagcggcagcgcgccggtaactgccggggccgccgggcccgccgcgcaggaggcggagccgcctctcaccgcggtgctggtggaggaggaggaggaggaaggcggcagggccggcgctgagggcggcgcggccgggcccgacgacgggggggtggccgcggcctcctcgggctcggcccaggctgcttcatctcctgcggcctcagtgggcactggagttgccgggggcgcagtatcgacgccggctccagctccagcctcggctcccgctccgggtccctcggcagggccgcctcctggaccgccagcctcgctcctggacacctgcgccgtgtgtcagcagagcttgcagagccggcgtgaggcggagcccaagctgctgccctgtcttcactccttctgcctgcgctgcctgcccgagccggagcgccagctcagcgtgcccatcccggggggcagcaacggcgacatccagcaagttggtgtaatacggtgcccagtatgccgccaagaatgcagacagatagaccttgtggataattattttgtgaaagacacatctgaagctcctagcagttctgatgaaaaatcagaacaggtatgtactagttgtgaagacaatgcaagtgcagttggcttttgtgtagaatgtggagagtggctatgtaagacatgtatcgaagcacatcaaagagtaaaatttactaaagatcacttgatcaggaagaaagaagatgtctcagagtctgttggagcatctggtcaacgccctgttttctgccctgtacacaaacaagaacagttgaaacttttctgtgaaacatgtgatagattgacatgtagagactgtcagctattggaacacaaagaacataggtatcagtttttggaagaagcttttcaaaatcagaagggtgcaattgagaatctactggcgaaacttcttgagaagaagaattatgttcattttgcagctactcaggtgcagaataggataaaagaagtaaatgagactaacaaacgagtagaacaggaaattaaagtggccattttcacccttatcaatgaaattaataagaaaggaaaatctctcttacaacagctagagaatgttacaaaggaaagacagatgaagttactacagcagcagaatgacatcacaggcctttcccggcaggtgaagcatgttatgaacttcacaaattgggcaattgcaagtggcagcagcacagcactactatacagcaagcgactgattactttccagttgcgtcatattttgaaagcacggtgtgatcctgtccctgctgctaatggagcaatacgtttccattgtgatcccaccttctgggcaaagaatgtagtcaatttaggtaatctagtaatagagagtaaaccagctcctggttatactcctaatgttgtagttgggcaagttcctccagggacaaaccacattagtaaaacccctggacagattaacttagcacagcttcgactccagcacatgcaacaacaagtatatgcacagaaacatcagcagttgcaacagatgaggatgcagcaaccaccagcacctgtaccaactacaacaacaacaacacaacagcatcctagacaagcagcccctcagatgttacaacaacagcctcctcgattgatcagtgtgcaaacaatgcaaagaggcaacatgaactgtggagcttttcaagcccatcagatgagactggctcagaatgctgccagaataccagggatacccaggcacagcggccctcaatattccatgatgcagccacacctccaaagacaacactcaaacccagggcatgctggaccctttcccgtagtatcggtacacaacaccacaatcaacccaacgagccctactacagcaactatggcaaatgcaaaccgaggtcccaccagcccatctgttacagcaatagagctaatcccctcagttaccaatccagaaaaccttccatcgctgccagatattccacccatacagttggaagatgctggctcaagtagtttagataatctactaagtagatacatctcaggcagtcacctacccccacagcctacaagcaccatgaatccttctccaggtccctctgccctttctccgggatcatcaggtttatccaattctcacacacctgtgagacccccaagtacttctagtactggcagtcgaggcagctgtgggtcatcaggaagaactgctgagaagacaagtcttagtttcaaatctgatcaggtgaaggtcaagcaagaacctgggactgaagatgaaatatgtagcttttcaggaggtgtaaaacaagaaaaaacagaggatggcaggaggagtgcttgcatgttgagcagtcctgagagtagcttgacaccacctctctcaaccaacctgcatctagaaagtgaattggatgcattggcaagcctggaaaaccatgtgaaaattgaacctgcagatatgaatgaaagctgcaaacagtcagggctcagcagccttgttaatggaaagtccccaattcgaagcctcatgcacaggtcggcaaggattggaggagatggcaacaataaagatgatgacccaaatgaagactggtgtgctgtctgccaaaacggaggagatctcttgtgctgcgaaaaatgtccaaaggtctttcatctaacttgtcatgttccaacactacttagctttccaagtggggactggatatgcacattttgtagagatattggaaagccagaagttgaatatgattgtgataatttgcaacatagtaagaaggggaaaactgcgcaggggttaagccccgtggaccaaaggaaatgtgaacgtcttctgctttacctctattgccatgaattaagtattgaattccaggagcctgttcctgcttcgataccaaactactataaaattataaagaaaccaatggatttatccaccgtgaaaaagaagcttcagaaaaaacattcccaacactaccaaatcccggatgactttgtggccgatgtccgtttgatcttcaagaactgtgaaaggtttaatgaaatgatgaaagttgttcaagtttatgcagacacacaagagattaatttgaaggctgattcagaagtagctcaggcagggaaagcagttgcattgtactttgaagataaactcacagagatctactcagacaggaccttcgcacctttgccagagtttgagcaggaagaggatgatggtgaggtaactgaggactctgatgaagactttatacagccccgcagaaaacgcctaaagtcagatgagagaccagtacatataaagtaaaatgacatggatttaaatcaattgtttaaaaaaaaaaaaacgaaaaaaaaaaaaaaaacacaaaaaacccagaaaacttttaagtgttgctggaatatcctgcctacagtgggcacctccttgaagaagctgatagcttttacacagtattagattgaaataatggacagaaacacattcttgtcaagaaagggggagagaagtctgtttgcaagtttcaaagcaaaaagcaaaagtgaaatgatttgaggatttctgttctaatggagatgattctctgattgttagaaatggcaaatattgatgattgtgtgctattgattggtgcaggatacttggtatacgagtaaatacttgagactcgtgtcacttgataaattttctttttggactaggtcgcacagttattaaaacaacttttaaccctcccccttcacacacatacatatcaggttgttttctagttaaaaacccaagtagctcagattctactttaatgtcagtgcagatttgcattgaatcatgccattatgttttttctcatttttatgctgttgggtcttagtttttaaattgatataaagaactcagcaatggttttattttctactcatacttagggtttaggaaacactaccactagttatcatttaatcaacttcaatggtctactgaaacaaaaatggtaacttttcattagtggattatttagagttatagtagttgtttccagaaaacacttcctcacaattgtacttcccaatcaaatcatgtgatcatacagttattcccatgaaaggcagaatgtttgtttcaaaattaatctagttttctgtacatttaaatttgagaaggtgacaactggctcttttccagtcttccttcatgtcagttttctgatagaccactattggcaaacagtatctgtcaactaccaaatgtgtaaaattttctgtatttcactttgtcttatttgtaaatagtgaactaaaacttttggcagatcagcaacatttgctgagcctgttttttaagctaatgtgtattcttactaatgttcctatcaagaatggatttgtaatatatgctgtctatttctaatgttcacattcatattttgaggttctatcttattttaatagagaacagacttctcaaaaaatcttcagaagcagcttattattgaaatatcgaaatattgaaataaacccggtggggttagattactcatctgtccaccaagtgggacatttgcatggactgggggcttaaaggacttagaagagacctgtaagtaaatcctgaaaatgagccaatccccacttgaatggttactggagtaaacccacctttaccaccccaattacagcacccgaggccgataaaccaacttggctctggttcatttttcttttcttcatttgtgatgctcagattcaaaatgtgtgttctacactgttacaggcttctcttttgtttgattaaagattttagtcctacttttgtatggacacattagaatattcagagaccaaaatagaagaatttgctgttagatatttttcagaagtcagcagatttgtggcaaatcatttatttgcctttttaaaaattcatttaagcagttcagagagtagactactcagaaaattatttcacgtaattgtctaagaggtcaatattttttaatgcatattgaatcaaataaagtgctctaaagaaattattatacaaattcctttgggttgtttttcttttcttaacaaggggtgggggtaaacaggaatatgattcaggctttctggttgtgtatttaaagagtattgattttattattactattgatttactttattcctggcttccttttcacttttctttcaatttttaaaaaataatttaagccgttgaaaatataccaaactgttgaaacattttactcaaattttaaattcctaaaaatgttttttaataagagggagaaaattatttaaaaatacttatgcctatgccaatttccctcttttttcacaaaatccatgatttcagtttgtaagtagacatatatctaagggcacatttttggaaagtgaggaatagcagcagtataacttcattttgtcaggcctttgagttctaatattttgtattgctcttcaaatggatccttttaaaaaaattgtagataatgagtcataaatagattctgccaactgaggggagaaacattttaagtaaatatttttcagtatttggggccttaaaaaataattgtgtttccttaaaattacatgttagatagagtttttaggtttttttggttttaagattggttaaagcaatttaaaagccacttttttgtcaacatttaatagcctccacttctgttaagataatgtatactgctgaggaattactattaatagctatcaacataccaccattaaattaaggtattcactttagattttttattaaagcttttttcttgcacactgatcgttgtgtttctaagctgattttttcagctctaatatacctatggttaaaaagtataaaaacttaaattgatatttagatatatgttttcctattagtttatgttttaaaaagacaaaattgtatctgtcagtccctgaaggcagtttgtttttatactctctcacatttgtatttgttttttaaatggcagtattttagaagatttggagaaaagtccacataataatgttttcttaaaagcttttaaagtttttgctgtacttcaatttacttcttccatcagaaaactaagaacaaagtgttgctcagtctgttccgctgacctaaatttgtgttttcagcacttggctcagccaattcactgagtgaaggaattgctttatgaggcaaagcatgtgaaagttctaaagtatggttagattgtaggtcgtgctctatatggaaacatcaaaccattactacagagaaatgataaggcattggatccactattgaaattattatttttggatcaacaagttggtactttctgacttctgtatcttaacataagggaattttaggtaatgctaagtcagttgtctcattttttgtgataagttttggaatttttagttaattgaaataaataatgcttttaaatagaagtaaaaggtttataagtgtgcaaattgtagatttatcaattacctcagcaggtatcctgccatgtaattattagtgattagtgttaataagataatagattcaggtcttccaactatgcccttggattgtggcctactgtatgttattaaatggtctcttactatccaaaatgggagtagatgctgtggccccgtctcccttggcttttacgtcccatatccacccccattcatgtacaacatgtgaaatataaaaatctcatttcttgtcaaaatcagcactgcttatttgcatactcagcatcggatcagtgagtagttttataaaaaatccacgcacccaactcccttagttaaaacagattcttaattcataccatgaattcttaatttctgtaccatctatgttaatgatctgctgaaggtgactcaagattttcaaggtgtaatacagtttgatcatgtaccggacctggatatttaattttttttccctcacagttaatctcctccttgataaagcaataacactgctttgagtctgttgcctaatagcatgtcagaatcctctcctggatggtgattttataggaaagtttgtatgcatatcacccagtctatcttttaaaaattaagaaatttaaatgtatgctggaagtaatgacactatattgtggcattttattttaaaaattggggaaagttgcatatttttttaaaagtaagtgtttgagtaaaaaaattgaaggtacttttttaaggaaaaaaatttatatgccacagtttacatagacatttcagattcaacacgtactcttgaatataatggtttcttttacttggtcaaaatgcatgtatagcatttctttcatcttagttccttgtgtttgcctatgtggtcctttatatattttttattgtatcgaagaaacaaaactatcttcaaaaataagttaatttggatatatttgtcatatcaaactacaaagtgtacaaagttaagtttagcccttttctagaaagtgatctttaaaattaaaaatgctcctcttttaaattcaccaaatttatgtgtgggaaggcaccaaaatgattttgtaagtgccactgcaatattccctttcaagtgtggcctaaatttcaatcttaaggatggaatgcatgtctgctccttgttctgaaaaatgtaggcatctactacattttaaaacacagtgaaacatatacataagcctataaaaaaagatttgtgcaatttgaaagcctgttaattttttatgtagacatacctacacacgaaagggttaaattcacagccttactagttccttgcttccagtatttcaattggtctcctcccctcattattattattactactagtactattatttttgcacatagttaactgcccttcaatatgattcttaaaaagtgctgtttctgtggtatcgtattctctaaataatcatatttaattttttaaaacaaggttgcagtttctaattgtttcgttcctgtgtttttgctggtgtgtaataaaagcaagttttttcttttcatggttatttaatacattagctgcctgtaaataattcttgttataatgctctggaatgtgttgtagaagttgtattagattagttttaaacccttgtttgaaagccacattgttttggttatttctattaaattagaaaattgaaaaagttttcaaatgaa

SEQ ID NO: 26 - protein, 1127 aa, Homo sapiens
MAENKGGGEAESGGGGSGSAPVTAGAAGPAAQEAEPPLTAVLVEEEEEEGGRAGAEGGAAGPDDGGVAAASSGSAQAASSPAASVGTGVAGGAVSTPAPAPASAPAPGPSAGPPPGPPASLLDTCAVCQQSLQSRREAEPKLLPCLHSFCLRCLPEPERQLSVPIPGGSNGDIQQVGVIRCPVCRQECRQIDLVDNYFVKDTSEAPSSSDEKSEQVCTSCEDNASAVGFCVECGEWLCKTCIEAHQRVKFTKDHLIRKKEDVSESVGASGQRPVFCPVHKQEQLKLFCETCDRLTCRDCQLLEHKEHRYQFLEEAFQNQKGAIENLLAKLLEKKNYVHFAATQVQNRIKEVNETNKRVEQEIKVAIFTLINEINKKGKSLLQQLENVTKERQMKLLQQQNDITGLSRQVKHVMNFTNWAIASGSSTALLYSKRLITFQLRHILKARCDPVPAANGAIRFHCDPTFWAKNVVNLGNLVIESKPAPGYTPNVVVGQVPPGTNHISKTPGQINLAQLRLQHMQQQVYAQKHQQLQQMRMQQPPAPVPTTTTTTQQHPRQAAPQMLQQQPPRLISVQTMQRGNMNCGAFQAHQMRLAQNAARIPGIPRHSGPQYSMMQPHLQRQHSNPGHAGPFPVVSVHNTTINPTSPTTATMANANRGPTSPSVTAIELIPSVTNPENLPSLPDIPPIQLEDAGSSSLDNLLSRYISGSHLPPQPTSTMNPSPGPSALSPGSSGLSNSHTPVRPPSTSSTGSRGSCGSSGRTAEKTSLSFKSDQVKVKQEPGTEDEICSFSGGVKQEKTEDGRRSACMLSSPESSLTPPLSTNLHLESELDALASLENHVKIEPADMNESCKQSGLSSLVNGKSPIRSLMHRSARIGGDGNNKDDDPNEDWCAVCQNGGDLLCCEKCPKVFHLTCHVPTLLSFPSGDWICTFCRDIGKPEVEYDCDNLQHSKKGKTAQGLSPVDQRKCERLLLYLYCHELSIEFQEPVPASIPNYYKIIKKPMDLSTVKKKLQKKHSQHYQIPDDFVADVRLIFKNCERFNEMMKVVQVYADTQEINLKADSEVAQAGKAVALYFEDKLTEIYSDRTFAPLPEFEQEEDDGEVTEDSDEDFIQPRRKRLKSDERPVHIK

SEQ ID NO: 27 - DNA, 4526 bp, Homo sapiens
  CDS (167)..(3361)
acggctgcgcagatgccgactttagaggaggcggagtttcggccttcgcctgctggaaaagcagtaggatcggccagtggcgacagcaggagctgagcctaagccctggcggggctttgggctgtagattcctgtctgactaaagggacctcaaaaaggagggaaaatggcttctgagtctgaaactctgaatcccagtgctaggataatgaccttttatccaactatggaagagttccgaaacttcagtagatacattgcctacattgaatcccaaggagctcatcgggcagggctagccaaggttgttcctccaaaagagtggaagccacgagcatcctatgatgacattgatgatttggtcattcctgcccccattcaacagctggtgacggggcagtctggcctctttactcagtacaacatacagaagaaagccatgactgttcgagagttccgcaagatagccaatagcgataagtactgtaccccacgctatagtgagtttgaagagctcgagcggaaatactggaaaaatcttacattcaatcctccaatctatggtgcagatgtgaatggtaccctctatgaaaagcatgttgatgagtggaatattggccggctgagaacaatcctggacttggtggaaaaggagagtgggatcaccattgagggtgtgaacaccccatacctgtactttggcatgtggaagacatcctttgcttggcacactgaagacatggacctctacagcatcaactacctgcactttggagaaccaaagtcctggtactctgttccacctgagcatggaaagcggttggaacgcctcgccaaaggctttttcccaggaagtgctcaaagctgtgaggcatttctccgccacaagatgaccctgatttccccgttaatgctgaagaaatatggaattccctttgacaaggtgactcaagaggctggagagtttatgatcactttcccttatggttaccatgccggctttaaccatggttttaactgtgcggagtctaccaattttgctacccgtcggtggattgagtacggcaagcaagctgtgctgtgctcctgtagaaaggacatggtgaagatctccatggatgtgtttgtgagaaagttccagccagaaaggtacaaactttggaaagctgggaaggacaacacagttattgaccatactctgcccacgccagaagcagctgagtttcttaaggagagtgaactgcctccaagagctggcaacgaggaggagtgcccagaggaggacatggaaggggtggaggatggagaggaaggagacctgaagacaagcctggccaagcaccgaatagggacaaagaggcaccgagtttgtcttgaaataccacaggaggtgagtcagagtgagctcttccccaaggaggatctgagttctgagcagtatgagatgacggagtgcccggcagccctcgcccctgtgaggcccacccatagctctgtgcggcaagttgaggatggtcttaccttcccagattattctgactccactgaagtcaaatttgaagagcttaaaaatgtcaaactagaagaggaggatgaggaggaagaacaagcagcagctgccttggatctttctgtgaatcctgcgtctgtagggggacgccttgtcttctcaggctccaaaaagaaatcatcttctagcctgggctctggctcttcacgggattctatctcttctgattcagaaactagtgagcctctctcctgccgagcccaagggcaaacgggagttctcactgtgcacagttatgccaaaggggatggcagggtcactgtgggagagccatgcacgaggaagaaaggaagcgccgctagaagtttcagtgagcgggagctggcagaggttgcagatgaatacatgttttccctagaagagaataagaagtccaagggacgccgtcagcctttaagcaagctcccccgccatcacccacttgtgctgcaggagtgtgtcagtgatgatgagacatctgaacagctgacccctgaggaagaggctgaggagacagaggcctgggccaagcctctgagccaactgtggcagaaccgacctccaaactttgaggctgagaaggaattcaatgagaccatggcccaacaggcccctcactgcgctgtctgtatgatcttccagacttatcatcaggttgaatttggaggctttaatcagaactgtggaaatgcttcagatttagccccccagaagcagaggaccaagccattgattccagaaatgtgcttcacttcgactggctgcagcacggacatcaacctttctactccttatcttgaggaggatggcaccagcatactcgtttcctgcaagaagtgcagcgtccgggtccatgccagttgctatggggtcccccctgcaaaggcttctgaagactggatgtgttctcggtgttcagccaatgccctagaggaggactgctgtttatgctcattacgaggaggggccctgcagagagcaaatgatgacaggtgggtccacgtttcatgtgctgtggcaattctggaagcaaggtttgtcaacattgcagaaagaagtccggtggatgtgagcaaaatccccctgccccgcttcaaactgaaatgtatcttctgtaagaagcggaggaaaagaactgctggctgctgtgtgcagtgttctcacggccgctgcccaactgccttccatgtgagctgcgcccaggctgccggtgtgatgatgcagcctgacgactggccttttgtggtcttcattacctgctttcggcacaagattcctaatttggagcgtgccaagggggccttgcaaagcatcactgcaggccagaaagtcattagcaagcataagaacgggcgcttctaccagtgtgaagtggtcaggctcaccaccgagaccttctatgaagtcaactttgatgatggctccttcagcgacaatctttatcctgaggacatagtgagccaggactgtctccagtttggtcctcctgctgaaggggaagtggtccaagtgagatggacagacggccaagtctatggagccaagtttgtggcctcccaccctatccaaatgtaccaggtggagtttgaggatggctcacaacttgtggttaagagagatgatgtatacacactggatgaagagcttcccaagagagtcaaatctagactgtcagtagcctcagacatgcgcttcaatgagattttcacagagaaagaggttaagcaagaaaagaaacggcaacgagttatcaactcaagataccgggaagattatattgagcctgcactataccgggccatcatggagtaggtgcttccagggtccaagggattctcagccatccaggcaagagcactctgggttccacagcacagcagacatggaacgctgaagtctctgaaagtgaagttgtaaaaagaaaaggaatgaaataaccgacccatcatcttctcacccaccctcattgcattccgctgtagtgaaaggacgagccatttctgggcacgtggcagcagtcgctgatctcccagctgaggggctgagcactggaatgctgtggctgcactggccccagtccatagaggggtcaactatgctggctggactggctgccttgttcctggcctaggacttagcttcataactatcacctgcaccgactaggctgaggtgctggtacttgccccaacccctacttttgtatttatatgtgtgtgtgtgtgtgcgtgcgtgcgtgcgtgcgtgtatgtttggtctggaccagcttctgccagcccctggcctttactttcttccttgcctatgcagggcaaacaaaatgtgaaattctgccctcagctgagctgagtaagggctcctgggggttggctggagatgggtgtggcatctgtccaggcctggaaccgtctcaagacagtgctggcaaagctgcagtattgagatgctaaggagctgatgccacctctttgtcttcccctaaaggagaacatggggataacatgggtgtgtgcccacaacactctaggtgcagagcccctgtggcaaagtattacagggtgtgggtggggattaccctgaatcggggattttaatgatggaagcaggcagagcctggtgggtgattctgtcaacagaaaattgcaatcatgcaggggctgggagggttaggatgaaaaaactggggccattggaggcccactgtaggtgggagggagctgattttggggtggggggtgggactagagggcaatactgaaggggttaaacaggtttttgctcctcaagaatttgtttgcctgggcccaggattggagggcttcacaccaataccctgtgtatacaagaatcagatttataatacttccccttttttgttacgtatgaacactataaaccaaattattttgaaaactggtgcatcaccttgtccttagcaataaaatgtgttgagcagaggaaaaaaaaaaaaaaaaaa

SEQ ID NO: 28 - protein, 1064 aa, Homo sapiens
MASESETLNPSARIMTFYPTMEEFRNFSRYIAYIESQGAHRAGLAKVVPPKEWKPRASYDDIDDLVIPAPIQQLVTGQSGLFTQYNIQKKAMTVREFRKIANSDKYCTPRYSEFEELERKYWKNLTFNPPIYGADVNGTLYEKHVDEWNIGRLRTILDLVEKESGITIEGVNTPYLYFGMWKTSFAWHTEDMDLYSINYLHFGEPKSWYSVPPEHGKRLERLAKGFFPGSAQSCEAFLRHKMTLISPLMLKKYGIPFDKVTQEAGEFMITFPYGYHAGFNHGFNCAESTNFATRRWIEYGKQAVLCSCRKDMVKISMDVFVRKFQPERYKLWKAGKDNTVIDHTLPTPEAAEFLKESELPPRAGNEEECPEEDMEGVEDGEEGDLKTSLAKHRIGTKRHRVCLEIPQEVSQSELFPKEDLSSEQYEMTECPAALAPVRPTHSSVRQVEDGLTFPDYSDSTEVKFEELKNVKLEEEDEEEEQAAAALDLSVNPASVGGRLVFSGSKKKSSSSLGSGSSRDSISSDSETSEPLSCRAQGQTGVLTVHSYAKGDGRVTVGEPCTRKKGSAARSFSERELAEVADEYMFSLEENKKSKGRRQPLSKLPRHHPLVLQECVSDDETSEQLTPEEEAEETEAWAKPLSQLWQNRPPNFEAEKEFNETMAQQAPHCAVCMIFQTYHQVEFGGFNQNCGNASDLAPQKQRTKPLIPEMCFTSTGCSTDINLSTPYLEEDGTSILVSCKKCSVRVHASCYGVPPAKASEDWMCSRCSANALEEDCCLCSLRGGALQRANDDRWVHVSCAVAILEARFVNIAERSPVDVSKIPLPRFKLKCIFCKKRRKRTAGCCVQCSHGRCPTAFHVSCAQAAGVMMQPDDWPFVVFITCFRHKIPNLERAKGALQSITAGQKVISKHKNGRFYQCEVVRLTTETFYEVNFDDGSFSDNLYPEDIVSQDCLQFGPPAEGEVVQVRWTDGQVYGAKFVASHPIQMYQVEFEDGSQLVVKRDDVYTLDEELPKRVKSRLSVASDMRFNEIFTEKEVKQEKKRQRVINSRYREDYIEPALYRAIME

SEQ ID NO: 29 - DNA, 2318 bp, Homo sapiens
  CDS (249)..(1637)
gagcagatgggaggtgcggcgacagtgtttgacgagagccgaaggaggctgtgggaggtgttggcggcggcggcgcgggcgcctgaggaggaggaggagaagcggatgagatcgtggggctcaccagcgtcccccatggcttctgagtagcgtgggagtggagtcagcaccaagccaggctccccgcgcctgccttgccctcacctgctcctgctctctgccagaggcagcatggtccgcagggcaccatggggcccgacagagtgacagcacgagaactgtgcgagaacgacgacctggccaccagcctcgtcctggacccctacctcggtttccgcacccataagatgaacgtcagccctgtgccccccctgcggcgacagcagcacctgcgctcagcgctggaaactttcctgaggcagcgggacctggaggctgcgtaccgggccctgacgctgggaggctggacggcccgctacttccagagccggggcccgcggcaggaggctgccctcaagacccacgtctatcgctacctccgtgccttcctgccggaaagtggctttaccatcctgccctgcacgcgctactccatggagaccaacggggccaagatcgtgtccactcgtgcttggaaaaagaatgagaagctggagctgctggtgggctgcattgcagagctgcgggaggcagatgaggggctgctgagggccggtgagaatgacttcagcatcatgtactcaacccgcaagcggagtgctcagctgtggctgggcccagccgccttcatcaaccatgactgcaaacccaactgcaagtttgtgcctgcagatgggaacgcagcctgcgtgaaggtgctccgggacattgagcctggggacgaggtgacatgcttctacggcgagggcttcttcggcgagaagaatgagcactgtgaatgccacacctgtgagaggaaaggtgaaggagctttccgaaccaggcctagggagcccgcgttgccaccacggcccctggacaagtaccagctgcgtgagaccaagcggcggctgcagcaaggcctggacagtggcagccgacagggcctgctgggccctcgggcctgcgtgcacccatccccgctgcgccgggacccattctgcgccgcctgccagcccctgcgcctgccagcctgcagcgcccgcccagacacctcacccctctggctccagtggctgcctcagccccagccccgagtgcggccccggaagcgccgacgcccccggccccggagggccccagtgctctccacccaccacgctgcccgcgtctccctgcaccgatggggaggctgtggcccccactgccgcctgcgaggagaggccctggtggccctgggccagcccccccacgcccgctgggcccctcagcaggactggcactgggcccggcgctatgggctgccttacgtggtgcgtgtggaccttcgtcgcctggccccagccccaccagctaccccagcccctgctgggaccccaggccccatcctgatcccgaagcaggccctcgccttcgcccccttctccccacccaagcgcctacggctggtggtcagccacggctccatcgacctggatgtcggcggtgaagagctgtgacaggccggacggggaggcccagcagggagagagggtctctctcctagctgctacccaggacctccagaaggagcccttggacctctgggagggagctgacccttgactccagcatagctctgaccctggaatggggttggtttggacacccccagggatctgagccctgaccctttgtgactgctgacccctgagccacccccactcccacagggagccccggccatttgctgccctccccacccctgccccagcctcaggactgcaggagccatccgcccccctcagccccttcctccccagggagcaaagccataaggggcaggggccaccccacggcatctccccagaagtacaggcctcaggaggaggtggaactgatgtagggggtggcactccccagagactgccctcacgaggggactgggttcgctctcagctctgcagctgtctgcggtggggggaaggttggggggtgtctggaggcatgttcccctcaccaccccccgtgggtctcagggaggccgggtgtgacctcatctttctcatggtgctatcctggtgctattggggtggggagctccctcccctcccccacaccagaaaggggtatgttgggggcttggaagcacttgaactttttattttattaaaaccttgttataagcagcaaaaaaaaaa

SEQ ID NO: 30 - protein, 462 aa, Homo sapiens
MGPDRVTARELCENDDLATSLVLDPYLGFRTHKMNVSPVPPLRRQQHLRSALETFLRQRDLEAAYRALTLGGWTARYFQSRGPRQEAALKTHVYRYLRAFLPESGFTILPCTRYSMETNGAKIVSTRAWKKNEKLELLVGCIAELREADEGLLRAGENDFSIMYSTRKRSAQLWLGPAAFINHDCKPNCKFVPADGNAACVKVLRDIEPGDEVTCFYGEGFFGEKNEHCECHTCERKGEGAFRTRPREPALPPRPLDKYQLRETKRRLQQGLDSGSRQGLLGPRACVHPSPLRRDPFCAACQPLRLPACSARPDTSPLWLQWLPQPQPRVRPRKRRRPRPRRAPVLSTHHAARVSLHRWGGCGPHCRLRGEALVALGQPPHARWAPQQDWHWARRYGLPYVVRVDLRRLAPAPPATPAPAGTPGPILIPKQALAFAPFSPPKRLRLVVSHGSIDLDVGGEEL

SEQ ID NO: 31 - DNA, 3773 bp, Homo sapiens
  CDS (289)..(2184)
aggcgcacaggtaccattttgaccgtaaacatcctgccgatttgaaccgaggatttgggcggcaggaagagccgcggcgtaacggcagccatcttgtttgtttgagtgaatcggaaaggaggcgccggctgtggcggcggcgggagctgctcggaagctacacctcgcaagggctcccccctttccccaccccctcccccgacccttttcccctccccgggccacccagcccgcccaactcccagcggagagcaaggttttcttctgttttcatagccagccagaacaatgttctacgcacattttgttctcagtaaaagagggcctctggccaaaatttggctagcggcccattgggataagaagctaaccaaagcccatgtgttcgagtgtaatttagagagcagcgtggagagtatcatctcaccaaaggtgaaaatggcattacggacatcaggacatctcttactgggagtagttcgaatctatcacaggaaagccaaataccttcttgcagactgtaatgaagcattcattaagataaagatggcttttcggccaggtgtggttgacctgcctgaggaaaatcgggaagcagcttataatgccattactttacctgaagaatttcatgactttgatcagccactgcctgacttagatgacatcgatgtggcccagcagttcagcttgaatcagagtagagtggaagagataaccatgagagaagaagttgggaacatcagtattttacaagaaaatgattttggtgattttggaatggatgatcgtgagataatgagagaaggcagtgcttttgaggatgacgacatgttagtaagcactactacttctaacctcctattagagtctgaacagagcaccagcaatctgaatgagaaaattaaccatttagaatatgaagatcaatataaggatgataattttggagaaggaaatgatggtggaatattagatgacaaacttattagtaataatgatggcggtatctttgatgatccccctgccctctctgaggcaggggtgatgttgccagagcagcctgcacatgacgatatggatgaggatgataatgtatcaatgggtgggcctgatagtcctgattcagtggatcccgttgaaccaatgccaaccatgactgatcaaacaacacttgttccaaatgaggaagaagcatttgcattggagcctattgatataactgttaaagaaacaaaagccaagaggaagaggaagctaattgttgacagtgtcaaagagttggatagcaagacaattagagcccaacttagtgattattcagatattgttactactttggatctggcaccgcccaccaagaaattgatgatgtggaaagagacaggaggagtagaaaaactgttttctttacctgctcagcctttgtggaataacagactactgaagctctttacacgctgtcttacaccgcttgtaccagaagaccttagaaaaaggaggaaaggaggagaggcagataatttggatgaattcctcaaagaatttgaaaatccagaggttcctagagaggaccagcaacagcagcatcagcagcgtgatgttatcgatgagcccattattgaagagccaagccgcctccaggagtcagtgatggaggccagcagaacaaacatagatgagtcagctatgcctccaccaccacctcagggagttaagcgaaaagctggacaaattgacccagagcctgtgatgcctcctcagcaggtagagcagatggaaataccacctgtagagcttcccccagaagaacctccaaatatctgtcagctaataccagagttagaacttctgccagaaaaagagaaggagaaagagaaggaaaaagaagatgatgaagaggaagaggatgaagatgcatcagggggcgatcaagatcaggaagaaagaagatggaacaaaaggactcagcagatgcttcatggtcttcagcgtgctcttgctaaaactggagctgaatctatcagtttgcttgagttatgtcgaaatacgaacagaaaacaagctgccgcaaagttctacagcttcttggttcttaaaaagcagcaagctattgagctgacacaggaagaaccgtacagtgacatcatcgcaacacctggaccaaggttccatattatataaggagctagaagcattatagctagtgtttgattcactagtgcttacaaattgcccccatgtgtaggggacacagaaccctttgagaaaacttagatttttgtctgtacaaagtctttgcctttttccttcttcatttttttccagtacattaaatttgtcaatttcatctttgagggaaactgattagatgggttgtgtttgtgttctgatggagaaaacagcaccccaaggactcagaagatgattttaacagttcagaacagatgtgtgcaatattggtgcatgtaataatgttgagtggcagtcaaaagtcatgatttttatcttagttcttcattactgcattgaaaaggaaaacctgtctgagaaaatgcctgacagtttaatttaaaactatggtgtaagtctttgacaagaaaaaaaaacaaacaaacacttctttccatcagtaacactggcaatcttcctgttaaccactctccttagggatggtatctgaaacaacaatggtcaccctcttgagattcgttttaagtgtaattccataatgagcagaggtgtacgcgaaattgtgttatgactgatagccttcagctacaaaaagataggactgacctggtttaaagtgttctattttgtaaatcattccatttgagtctttctgatgaacttggctatactgaaatctgttattttagtgaggctccaaaatgagcaaagctaggcctgattagagtagagtgactattaaaaaacataactttctaggagctataaatcaaagttttaaaaagatgtttggatatatttgagtattccgatcatgaaaacagaaattgccctgcctactacaaggacagactgatgggaaattatgcacctggtcaacttagcttttaagcagacgatgctgtaaaaactaacggcttctctgatatttattgtaagttttagtactgatctccttttccagtgctgcacactcctggtttggaactttaatagcgttgcaacgaaatcctatatccagtttcctgtaatttaattgaagaaaaatacatccaaataaagactttattattaacagaccagatagcatcagaaatcatgtgactgttatgattatcagaatgtcttaactttttagggcaaagttaacactgaaagttctagcttaagtgttgaaacttttgtgggaaaaaaaaatcacttttgaaactcagacttcagtgtatacccaataatttaaaattatgtgaaatgttttaaatttgtgaactcgtaattactgttttaatgattcagtttcttcagagtggtaattgtataaaattgctattgcagctttacattcaatatgatgtgcctgtaaaccaaggagttttccccgtttgtaaaaagacattgtagataattgaatgtttgattttagaaaggtcattagtttcttgttacacattttgttagtctggtttttgttgcttatcgggtttaatattgttcttgaaaatagttgatgctatgttatgtataacttttctaataaaagttgtgttataagctgtaaaaaaaaaaaaaaaaaaaaaaaa

SEQ ID NO: 32 - protein, 631 aa, Homo sapiens
MFYAHFVLSKRGPLAKIWLAAHWDKKLTKAHVFECNLESSVESIISPKVKMALRTSGHLLLGVVRIYHRKAKYLLADCNEAFIKIKMAFRPGVVDLPEENREAAYNAITLPEEFHDFDQPLPDLDDIDVAQQFSLNQSRVEEITMREEVGNISILQENDFGDFGMDDREIMREGSAFEDDDMLVSTTTSNLLLESEQSTSNLNEKINHLEYEDQYKDDNFGEGNDGGILDDKLISNNDGGIFDDPPALSEAGVMLPEQPAHDDMDEDDNVSMGGPDSPDSVDPVEPMPTMTDQTTLVPNEEEAFALEPIDITVKETKAKRKRKLIVDSVKELDSKTIRAQLSDYSDIVTTLDLAPPTKKLMMWKETGGVEKLFSLPAQPLWNNRLLKLFTRCLTPLVPEDLRKRRKGGEADNLDEFLKEFENPEVPREDQQQQHQQRDVIDEPIIEEPSRLQESVMEASRTNIDESAMPPPPPQGVKRKAGQIDPEPVMPPQQVEQMEIPPVELPPEEPPNICQLIPELELLPEKEKEKEKEKEDDEEEEDEDASGGDQDQEERRWNKRTQQMLHGLQRALAKTGAESISLLELCRNTNRKQAAAKFYSFLVLKKQQAIELTQEEPYSDIIATPGPRFHII

SEQ ID NO: 33 - DNA, 7393 bp, Homo sapiens
  CDS (865)..(4353)
gagtctgacgggttcaaaatggcggcggctgcttcagcggctcctcctgtgtgagggaaacaacacccctccccggcagcggcggcggcggcggcggctctcggagcaccttcccagcggctgggcccgtggccgctctgtctttcctgggcaggggacgctccgggaggaggggcaacgccagggggcccatcccccggaatccctcttctgcgactggggagtagccggggggctcgtcccgcagcgcggagccagacctgagggggagacgcgaggggagccagggcccccatcccggcgcgccgcgccgctcccgccctgtccgccccccggggccggggcccgcgttccggggggccggggcggcgcggggagcctcgggccggccggtctcagctgatcggccgctgctcccgcaggcgaccagcccctgctggccgagggcacggcgaggagggcgctccctgcggccggggccggcccggggctcgggcccgggctgctgaccgctggcctgggggaggcgggggcgccccgggctcggcgccgaggggtcgcgctcctctctcctgacgcctccgactcccggtctccaaagccagaagagaaggtttgattcagcaactgtttgctcccttttcctggtcgctctgaccctctctggatactgggttgatccacggaaaaaccgaagacgacgtttgggatttaattattcctctcagctttggaatcttttacttctcacttggacaagaactcaagagcagaatctccgtgttgcaatctggttcctaaggaggaagaggaaggcagccctggagtggtttctttacagtaatttcaacagaagagtgagagatggaacccgaagaagaaaggattcgttacagccagagattgcgtggtaccatgcgacgacgctatgaagatgatggcatttcagatgatgaaattgaaggaaaaagaacttttgacttggaagagaaactgcacaccaacaaatataatgccaattttgttacttttatggaaggaaaagattttaatgtagagtatattcagcggggtggcttgagagatcctctgattttcaagaattctgatggactcggaataaaaatgccggatccagacttcactgtgaatgatgtcaaaatgtgtgtggggagtcgtcgcatggtggatgtcatggacgtgaacacacagaaaggcattgaaatgaccatggctcagtggacacgctactatgagaccccagaggaggagcgagagaaactctataatgtcatcagcctcgagtttagccacaccaggctggagaatatggtgcagaggccctccacggtggatttcattgactgggtagacaacatgtggccaaggcacttgaaggaaagccagactgaatcaacaaatgccatcttggagatgcagtaccctaaagtgcagaagtactgtctaatgagtgttcgaggctgctatactgacttccatgtggactttggtggtacctctgtttggtatcacatccatcaagggggaaaggtcttctggctcatcccccctacagcccacaacctggagctgtacgagaattggctgctgtcagggaaacagggagacatctttctgggtgaccgggtatcagattgtcagcgcattgagctcaagcagggctataccttcgtcattccctcaggctggattcatgctgtgtatactcctacagacacattagtgtttgggggcaattttttgcatagcttcaacatccctatgcagttaaaaatatacaacattgaagatcggacacgggttccaaataagtttcgctatccattctactatgagatgtgttggtatgtgttggagcgctatgtgtactgcataaccaaccgttcccacctaactaaggaatttcagaaagagtccctcagcatggatttggagttaaatgggttggagtctgggaatggggatgaggaagcagtggatcgagaaccccgacgcttgagcagcaggcgttctgtcctcactagccctgtagcgaatggagtcaacctggattatgatggactgggcaaaacctgccgaagtcttccaagtctgaagaaaactttggctggggactcatcttctgactgtagccggggctcccacaatggacaagtgtgggatccccagtgtgctccccgaaaggacaggcaagtgcatctgacccattttgagcttgaaggccttcgctgccttgtagataagttggagtctctgccactgcacaagaaatgtgtccccacagggatagaagatgaagatgctctcattgctgatgtaaagattttgctggaggagcttgccaacagcgatcccaagttagccctcactggagttcctatagtacagtggccaaaaagggataagcttaaattccccactcggccaaaggtgcgggttcctaccatccccattacgaagcctcacactatgaaaccagctccacggttaacacctgtgaggccagctgctgcctccccgattgtgtcaggagccagacggagacgagtgcgatgtcgaaaatgcaaagcctgtgtgcaaggagagtgtggtgtttgccactactgcagagacatgaagaagtttggggggcctggacgcatgaagcagtcctgtgtcctccgacagtgcttggcacccagactgcctcactcagtcacatgttccctctgtggagaggtggatcagaatgaagagacacaagactttgagaagaaactcatggaatgctgtatctgcaatgagattgttcatcctggctgcctccagatggacggagaggggttgcttaacgaagaattgccaaattgctgggaatgtccaaagtgctaccaggaggacagctcggagaaagcccagaagcggaaaatggaagagagtgacgaagaagctgtgcaagccaaagtcctgcggcccctgcggagctgcgatgagcctctcacgcccccgcctcattcacccacttccatgctgcagctcatccatgacccggtttccccccggggtatggtgactcggtcatcccctggggctggccccagcgaccaccacagtgccagccgcgatgagcgcttcaaacggcggcagttgctgcggctgcaggccacagagcgcaccatggtacgggaaaaggagaacaatcccagcggcaaaaaggagctgtctgaagttgagaaagccaagatccggggatcgtacctcactgtcacgctacagaggcccaccaaagagctccacgggacatccattgtgcccaagctgcaggccatcacggcctcctctgccaaccttcgccattccccccgtgtgctagtgcagcactgcccagcccgaaccccccagcgtggggatgaggaggggctggggggagaggaggaggaagaggaggaggaggaggaggaagatgacagtgcagaggaggggggtgcagccaggctgaatggccggggcagttgggctcaggatggagacgaaagctggatgcagcgggaggtctggatgtctgtcttccgctacctcagccgcagagaactttgtgaatgtatgcgagtgtgcaagacgtggtataaatggtgctgcgacaagagactttggacaaaaattgacttgagtaggtgtaaggccattgtgccccaggccctcagtggcatcatcaagaggcagccagtcagccttgacctcagttggaccaacatctctaaaaagcaactgacatggctcgtcaataggctgccaggactgaaagacctcctcctagcaggctgctcctggtctgcagtctctgccctcagcacctccagctgcccccttctcaggacccttgatcttcggtgggcagtaggaatcaaggaccctcaaattcgggacttgcttactccaccggctgataaaccaggtcaggacaatcgcagcaagctccggaacatgaccgacttccggctggcaggccttgacatcacagatgccacgcttcgcctcataattcgccacatgcccctcctgtctcgactcgacctcagtcactgcagccaccttacagatcagtcctccaatctactcactgctgtcgggtcttccactcgctactctctcacagagctcaatatggcaggttgcaataaattgacagaccagaccctgatctacctacggcgcattgccaacgtcaccttgatcgaccttcgaggatgcaagcagatcactcgaaaagcctgcgagcacttcatctcagacttgtccatcaacagcctctactgcctgtctgacgagaagctgatacagaagatcagctaagacacacccagcccagattcaacaggaaaccgatcttcccctgactccccaccgaggagagcctctcctcgaccctgcacgggctctgaggccagcgtcacactccctctctgctctcctgtcccttgagcccttcctctacaggtggggcagagagggtggtggacaccaggcttatctgcctgctcctctccctcctaaggaaaagggagtagcagattgatctgaggggaaagcacaggctgtgctgtcgaggcgcctgctcgcttactcgcctgccaggaggccgggctctcagtttggggtgtttgtgcaaccttcatctgcactgggccctgtgcccctcctccccatccatggtccccagcagtgcctggttctgagcaaactcccagggaagaaaacggccctgtctccatggccaggttcttgtggtgtccagtgcgcgtctctcctccatcacactctcccggcttgcgcaggaggggccagcagccccaggagtcccagacccgtgccgatcacactggtgctgttgagatctcccaaacctcacgtccttaactgtgctctccctcctttcctctcccttgagcttggttctgcccagcactcgtgcttgttcacataattaggtttcccaccccagcctacccgacttacttgctagtctctatgaggtccttattgcacttattggggttgaagctcttcagaggagctggaactgtctaccccagggacacacccatttcgttgctacccaagtggattctgagacaggcaccatctccttgttccccctctctcttttgcctcccactgactgcccttttccatgtgtcttcattctgcctgaagaaggctttcccaggatgcacgtcctcagagggagcagcctatctcccccaagctggaggcggcagaggactgggccaagccccaacctgcctcccagccaggctcctccaggcctctggtttagcggagccccctgagcccaggcctgtgtctagccccagtggctcactgaactttcagggcagtcagggggtcctgcttagaagccagtcaccagccctctgcctgcagccatggaagggggtgtgcacgtgcctctgtgtgtgtggctgagtgtattctgcgcgtgtgtgtggagggagggagggaggggagcatggtgtctcccgctccaccgccctttgttgagccccatcagctgcccccttttactttgcattgaacggcctgtccaaagatcctctctctagggcagcagagagctttttgcactttaaaaaaaaaaagaaagaaagaaaggtcggaatttcttttgggtcaatatttttaagtgtgtgaggagatgctcagtagcagcagcctatggcaagagcttataaatgattgatgcaaatttgcactctgctccccctctgtaaggatactgatagcacaacctcttccccccaccccgccccgccttttggtcgtccatccctgtccctttctggccctcttcctgtagcccagtctcaggctttcctcttcctgaagccctacagagttagggaatggagcccaggcaccaggggtctaaagtgtgagccactgagaagagagacgccaactgcacccttgccacttccaaagcaatagaggcagagtggtcccctctttgccacctaggccagttttgaccctggcattaactggccttagaagaaactggatcctggtagggggtggcattttgtttgtttcttccaatctgctgaatcttttgactgcaccttacaaacagcagtctgctcccatgaccctctgcccacttccattggtctccaggccccaataatctggggttgaaactttgaggaaatgccagtgacttattccagagtgcctcagttaggggaacttctctgtaaagaaccctgggtattgagcaaaaaccttattatcgttaatgacctataattggaagcttcctgcctttttctttggttgctcctgtggaaaatactgaaaagattactttgttttattttgttgtctttttataaaaggggaggtggagagaccccttcagagcagggattgtgccgggagagtgcctctgactttgggacatttcatccacagaaatttccaagccaatggtttcttttgggttttggtttttatgtttgttttttggggtttggaaaaacatgcatttttaccgtgcacgtaaattggtcagcagaaaagggagcccagaaaaggcagcagatggaccatgcccttgctgggttttccttttctttgggactgtgaggggaaatggtttttagaggtgagggttggtccatgtggaggaaagaagtgtctctgttgggggacagaggaacctggggagtccatcgcatgtcctacaatctgctcttagacacggccttgccaggagagcctgccctcagactgcaggaccagaacccctgcctccatctttccaagcaccggggcgaaaaaccacaaaggaaaggaagaaaatttatatatatataatataaaatcacttggtgattaaaaaaataactgctccataaataaaactcctaaagtcacttatgtttaaagggtttggttgtgttttttgtttttcggagaaatattgtaaatatatatttttttgttgctgatttagagtcaatctccaatgttgtgctaaaaagtttaaattaaatgtaagcattaaggggataagtcttatgctatctcagttgacacattgaggttattttgggccagagaaggaggaagctagttggactttgttttgttttccaaaagttctccactattggttttagagagagcaaggacatctttcctctgacacgtgggaatgggtgatatttgtgtaataaaatttttaaaagacaaaaaaagaaatagcctccaatgggaaatattttaatttaggttttgtttttgtttgggggtttttgtttttttaaaaaaataaaaaggctttaaaaacaaaaaaaaaaaaaaaaaa

SEQ ID NO: 34 - protein, 1162 aa, Homo sapiens
MEPEEERIRYSQRLRGTMRRRYEDDGISDDEIEGKRTFDLEEKLHTNKYNANFVTFMEGKDFNVEYIQRGGLRDPLIFKNSDGLGIKMPDPDFTVNDVKMCVGSRRMVDVMDVNTQKGIEMTMAQWTRYYETPEEEREKLYNVISLEFSHTRLENMVQRPSTVDFIDWVDNMWPRHLKESQTESTNAILEMQYPKVQKYCLMSVRGCYTDFHVDFGGTSVWYHIHQGGKVFWLIPPTAHNLELYENWLLSGKQGDIFLGDRVSDCQRIELKQGYTFVIPSGWIHAVYTPTDTLVFGGNFLHSFNIPMQLKIYNIEDRTRVPNKFRYPFYYEMCWYVLERYVYCITNRSHLTKEFQKESLSMDLELNGLESGNGDEEAVDREPRRLSSRRSVLTSPVANGVNLDYDGLGKTCRSLPSLKKTLAGDSSSDCSRGSHNGQVWDPQCAPRKDRQVHLTHFELEGLRCLVDKLESLPLHKKCVPTGIEDEDALIADVKILLEELANSDPKLALTGVPIVQWPKRDKLKFPTRPKVRVPTIPITKPHTMKPAPRLTPVRPAAASPIVSGARRRRVRCRKCKACVQGECGVCHYCRDMKKFGGPGRMKQSCVLRQCLAPRLPHSVTCSLCGEVDQNEETQDFEKKLMECCICNEIVHPGCLQMDGEGLLNEELPNCWECPKCYQEDSSEKAQKRKMEESDEEAVQAKVLRPLRSCDEPLTPPPHSPTSMLQLIHDPVSPRGMVTRSSPGAGPSDHHSASRDERFKRRQLLRLQATERTMVREKENNPSGKKELSEVEKAKIRGSYLTVTLQRPTKELHGTSIVPKLQAITASSANLRHSPRVLVQHCPARTPQRGDEEGLGGEEEEEEEEEEEDDSAEEGGAARLNGRGSWAQDGDESWMQREVWMSVFRYLSRRELCECMRVCKTWYKWCCDKRLWTKIDLSRCKAIVPQALSGIIKRQPVSLDLSWTNISKKQLTWLVNRLPGLKDLLLAGCSWSAVSALSTSSCPLLRTLDLRWAVGIKDPQIRDLLTPPADKPGQDNRSKLRNMTDFRLAGLDITDATLRLIIRHMPLLSRLDLSHCSHLTDQSSNLLTAVGSSTRYSLTELNMAGCNKLTDQTLIYLRRIANVTLIDLRGCKQITRKACEHFISDLSINSLYCLSDEKLIQKIS

SEQ ID NO: 35 - DNA, 7550 bp, Homo sapiens
  CDS (13)..(4821)
aagttggattccatgggttccaagagaagaagagctacctccccttccagcagtgtcagcggggactttgatgatgggcaccattctgtgtcaacaccaggcccaagcaggaaaaggaggagactttccaatcttccaactgtagatcctattgccgtgtgccatgaactctataataccatccgagactataaggatgaacagggcagacttctctgtgagctcttcattagggcaccaaagcgaagaaatcaaccagactattatgaagtggtttctcagcccattgacttgatgaaaatccaacagaaactaaaaatggaagagtatgatgatgttaatttgctgactgctgacttccagcttctttttaacaatgcaaagtcctattataagccagattctcctgaatataaagccgcttgcaaactctgggatttgtaccttcgaacaagaaatgagtttgttcagaaaggagaagcagatgacgaagatgatgatgaagatgggcaagacaatcagggcacagtgactgaaggatcttctccagcttacttgaaggagatcctggagcagcttcttgaagccatagttgtagctacaaatccatcaggacgtctcattagcgaactttttcagaaactgccttctaaagtgcaatatccagattattatgcaataattaaggagcctatagatctcaagaccattgcccagaggatacagaatggaagctacaaaagtattcatgcaatggccaaagatatagatctcctcgcaaaaaatgccaaaacttataatgagcctggctctcaagtattcaaggatgcaaattcaattaaaaaaatattttatatgaaaaaggctgaaattgaacatcatgaaatggctaagtcaagtcttcgaatgagtaataaaagagcagtacaaggaggtcgtttatcagcaattacaatggcacttcaatatggctcagaaagtgaagaagatgctgctttagctgctgcacgctatgaagagggagagtcagaagcagaaagcatcacttcctttatggatgtttcaaatcctttttatcagctttatgacacagttaggagttgtcggaataaccaagggcagctaatagctgaacctttttaccatttgccttcaaagaaaaaataccctgattattaccagcaaattaaaatgcccatatcactacaacagatccgaacaaaactgaagaatcaagaatatgaaactttagatcatttggagtgtgatctgaatttaatgtttgaaaatgccaaacgctataatgtgcccaattcagccatctacaagcgagttctaaaattgcagcaagttatgcaggcaaagaagaaagagcttgccaggagagacgatatcgaggacggagacagcatgatctcttcagccacctctgatactggtagtgccaaaagaaaaagtaaaaagaacataagaaagcagcgaatgaaaatcttattcaatgttgttcttgaagctcgagagccaggttcaggcagaagactttgtgacctatttatggttaaaccatccaaaaaggactatcctgattattataaaatcatcttggagccaatggacttgaaaataattgagcataacatccgcaatgacaaatatgctggtgaagagggaatgatagaagacatgaagctgatgttccggaatgccaggcactataatgaggagggctcccaggtttataatgatgcacatatcctggagaagttactcaaggagaaaaggaaagagctgggcccactgcctgatgatgatgacatggcttctcccaaactcaagctgagtaggaagagtggcatttctcctaaaaaatcaaaatacatgactccaatgcagcagaaactaaatgaggtctatgaagctgtaaagaactatactgataagaggggtcgccgcctcagtgccatatttctgaggcttccctctagatctgagttgcctgactactatctgactattaaaaagcccatggacatggaaaaaattcgaagtcacatgatggccaacaagtaccaagatattgactctatggttgaggactttgtcatgatgtttaataatgcctgtacatacaatgagccggagtctttgatctacaaagatgctcttgttctacacaaagtcctgcttgaaacacgcagagacctggagggagatgaggactctcatgtcccaaatgtgactttgctgattcaagagcttatccacaatctttttgtgtcagtcatgagtcatcaggatgatgagggaagatgctacagcgattctttagcagaaattcctgctgtggatcccaactttcctaacaaaccaccccttacatttgacataattaggaagaatgttgaaaataatcgctaccgtcggcttgatttatttcaagagcatatgtttgaagtattggaacgagcaagaaggatgaatcggacagattcagaaatatatgaagatgcagtagaacttcagcagttttttattaaaattcgtgatgaactctgcaaaaatggagagattcttctttcaccggcactcagctataccacaaaacatttgcataatgatgtggagaaagagagaaaggaaaaattgccaaaagaaatagaggaagataaactaaaacgagaagaagaaaaaagagaagctgaaaagagtgaagattcctctggtgctgcaggcctctcaggcttacatcgcacatacagccaggactgtagctttaaaaacagcatgtaccatgttggagattacgtctatgtggaacctgcagaggccaacctacaaccacatatcgtctgtattgaaagactgtgggaggattcagctggtgaaaaatggttgtatggctgttggttttaccgaccaaatgaaacattccacctggctacacgaaaatttctagaaaaagaagtttttaagagtgactattacaacaaagttccagttagtaaaattctaggcaagtgtgtggtcatgtttgtcaaggaatactttaagttatgcccagaaaacttccgagatgaggatgtttttgtctgtgaatcacggtattctgccaaaaccaaatcttttaagaaaattaaactgtggaccatgcccatcagctcagtcaggtttgtccctcgggatgtgcctctgcctgtggttcgcgtggcctctgtatttgcaaatgcagataaaggtgatgatgagaagaatacagacaactcagaggacagtcgagctgaagacaattttaacttggaaaaggaaaaagaagatgtccctgtggaaatgtccaatggtgaaccaggttgccactactttgagcagctccattacaatgacatgtggctgaaggttggcgactgtgtcttcatcaagtcccatggcctggtgcgtcctcgtgtgggcagaattgaaaaagtatgggttcgagatggagctgcatatttttatggccccatcttcattcacccagaagaaacagagcatgagcccacaaaaatgttctacaaaaaagaagtatttctgagtaatctggaagaaacctgccccatgacatgtattctcggaaagtgtgctgtgttgtcattcaaggacttcctctcctgcaggccaactgaaataccagaaaatgacattctgctttgtgagagccgctacaatgagagcgacaagcagatgaagaaattcaaaggattgaagaggttttcactctctgctaaagtggtagatgatgaaatttactacttcagaaaaccaattgttcctcagaaggagccatcacctttgctggaaaagaagatccagttgctagaagctaaatttgccgagttagaaggtggagatgatgatattgaagagatgggagaagaagatagtgaggtcattgaacctccttctctacctcagcttcagacccccctggccagtgagctggacctcatgccctacacacccccacagtctaccccaaagtctgccaaaggcagtgcaaagaaggaaggctccaaacggaaaatcaacatgagtggctacatcctgttcagcagtgagatgagggctgtgattaaggcccaacacccagactactctttcggggagctcagccgcctggtggggacagaatggagaaatcttgagacagccaagaaagcagaatatgaaggcatgatgggtggctatccgccaggccttccacctttgcagggcccagttgatggccttgttagcatgggcagcatgcagccacttcaccctggggggcctccaccccaccatcttccgccaggtgtgcctggcctcccgggcatcccaccaccgggtgtgatgaaccaaggagtggcccctatggtagggactccagcaccaggtggaagtccatatggacaacaggtgggagttttggggcctccagggcagcaggcaccacctccatatcccggcccacatccagctggaccccctgtcatacagcagccaacaacacccatgtttgtagctcccccaccaaagacccagcggcttcttcactcagaggcctacctgaaatacattgaaggactcagtgcggagtccaacagcattagcaagtgggatcagacactggcagctcgaagacgcgacgtccatttgtcgaaagaacaggagagccgcctaccctctcactggctgaaaagcaaaggggcccacaccaccatggcagatgccctctggcgccttcgagatttgatgctccgggacaccctcaacattcgccaagcatacaacctagaaaatgtttaatcacatcattacgtttcttttatatagaagcataaagagttgtggatcagtagccattttagttactgggggtggggggaaggaacaaaggaggataatttttattgcattttactgtacatcacaaggccatttttatatacggacacttttaataagctatttcaatttgtttgttatattaagttgactttatcaaatacacaaagatttttttgcatatgtttccttcgtttaaaaccagtttcataattggttgtatatgtagacttggagttttatctttttacttgttgccatggaactgaaaccattagaggtttttgtcttggcttggggtttttgttttcttggttttgggtttttttatatatatatataaaagaacaaaatgaaaaaaaacacacacacacaagagtttacagattagtttaaattgataatgaaatgtgaagtttgtcctagtttacatcttagagaggggagtatacttgtgtttgtttcatgtgcctgaatatcttaagccactttctgcaaaagctgtttcttacagatgaagtgctttctttgaaaggtggttatttaggttttagatgtttaatagacacagcacatttgctctattaactcagaggctcactacagaaatatgtaatcagtgctgtgcatctgtctgcagctaatgtacctcctggacaccaggaggggaaaaagcactttttcaattgtgctgagttagacatctgtgagttagactatggtgtcagtgatttttgcagaacacgtgcacaaccctgaggtatgtttaatctaggcaggtacgtttaaggatattttgatctatttataatgaattcacaatttatgcctataaatttcagatgatttaaaattttaaacctgttacattgaaaaacattgaagttcgtcttgaagaaagcattaaggtatgcatggaggtgatttatttttaaacataacacctaacctaacatgggtaagagagtatggaactagatatgagctgtataagaagcataattgtgaacaagtagattgattgccttcatatacaagtatgttttagtattccttatttccttattatcagatgtattttttcttttaagtttcaatgttgttataattctcaaccagaaatttaatactttctaaaatattttttaaatttagcttgtgcttttgaattacaggagaagggaatcataatttaataaaacgcttactagaaagaccattacagatcccaaacacttgggtttggtgaccctgtctttcttatatgaccctacaataaacatttgaaggcagcataggatggcagacagtaggaacattgtttcacttggcggcatgtttttgaaacctgctttatagtaactgggtgattgccattgtggtagagcttccactgctgtttataatctgagagagttaatctcagaggatgcttttttccttttaatctgctatgaatcagtacccagatgtttaattactgtacttattaaatcatgagggcaaaagagtgtagaatggaaaaaagtctcttgtatctagatactttaaatatgggaggccctttaacttaattgcctttagtcaaccactggatttgaatttgcatcaagtattttaaataatattgaatttaaaaaaatgtattgcagtagtgtgtcagtaccttattgttaaagtgagtcagataaatcttcaattcctggctatttgggcaattgaatcatcatggactgtataatgcaatcagattattttgtttctagacatccttgaattacaccaaagaacatgaaatttagttgtggttaaattatttatttatttcatgcattcattttatttcccttaaggtctggatgagacttctttggggagcctctaaaaaaatttttcactgggggccacgtgggtcattagaagccagagctctcctccaggctccttcccagtgcctagaggtgctataggaaacatagatccagccaggggcttccctaaagcagtgcagcaccggcccagggcatcactagacaggccctaattaagttttttttaaaaagcctgtgtatttattttagaatcatgtttttctgtatattaacttgggggatatcgttaatatttaggatataagatttgaggtcagccatcttcaaaaaagaaaaaaaaattgactcaagaaagtacaagtaaactatacacctttttttcataagttttaggaactgtagtaatgtggcttagaaagtataatggcctaaatgttttcaaaatgtaagttcctgtggagaagaattgtttatattgcaaacggggggactgaggggaacctgtaggtttaaaacagtatgtttgtcagccaactgatttaaaaggcctttaactgttttggttgttgttttttttttaagccactctccccttcctatgaggaagaattgagaggggcacctatttctgtaaaatccccaaattggtgttgatgattttgagcttgaatgttttcatacctgattaaaacttggtttattctaatttctgtatcatatcatctgaggtttacgtggtaactagtcttataacatgtatgtatcttttttttgttgttcatctaaagctttttaatccaaataaatacagagtttgcaaagtgatttggattaaccaggaaaaaaaaaaaaaaaaaa

SEQ ID NO: 36 - protein, 1602 aa, Homo sapiens
MGSKRRRATSPSSSVSGDFDDGHHSVSTPGPSRKRRRLSNLPTVDPIAVCHELYNTIRDYKDEQGRLLCELFIRAPKRRNQPDYYEVVSQPIDLMKIQQKLKMEEYDDVNLLTADFQLLFNNAKSYYKPDSPEYKAACKLWDLYLRTRNEFVQKGEADDEDDDEDGQDNQGTVTEGSSPAYLKEILEQLLEAIVVATNPSGRLISELFQKLPSKVQYPDYYAIIKEPIDLKTIAQRIQNGSYKSIHAMAKDIDLLAKNAKTYNEPGSQVFKDANSIKKIFYMKKAEIEHHEMAKSSLRMSNKRAVQGGRLSAITMALQYGSESEEDAALAAARYEEGESEAESITSFMDVSNPFYQLYDTVRSCRNNQGQLIAEPFYHLPSKKKYPDYYQQIKMPISLQQIRTKLKNQEYETLDHLECDLNLMFENAKRYNVPNSAIYKRVLKLQQVMQAKKKELARRDDIEDGDSMISSATSDTGSAKRKSKKNIRKQRMKILFNVVLEAREPGSGRRLCDLFMVKPSKKDYPDYYKIILEPMDLKIIEHNIRNDKYAGEEGMIEDMKLMFRNARHYNEEGSQVYNDAHILEKLLKEKRKELGPLPDDDDMASPKLKLSRKSGISPKKSKYMTPMQQKLNEVYEAVKNYTDKRGRRLSAIFLRLPSRSELPDYYLTIKKPMDMEKIRSHMMANKYQDIDSMVEDFVMMFNNACTYNEPESLIYKDALVLHKVLLETRRDLEGDEDSHVPNVTLLIQELIHNLFVSVMSHQDDEGRCYSDSLAEIPAVDPNFPNKPPLTFDIIRKNVENNRYRRLDLFQEHMFEVLERARRMNRTDSEIYEDAVELQQFFIKIRDELCKNGEILLSPALSYTTKHLHNDVEKERKEKLPKEIEEDKLKREEEKREAEKSEDSSGAAGLSGLHRTYSQDCSFKNSMYHVGDYVYVEPAEANLQPHIVCIERLWEDSAGEKWLYGCWFYRPNETFHLATRKFLEKEVFKSDYYNKVPVSKILGKCVVMFVKEYFKLCPENFRDEDVFVCESRYSAKTKSFKKIKLWTMPISSVRFVPRDVPLPVVRVASVFANADKGDDEKNTDNSEDSRAEDNFNLEKEKEDVPVEMSNGEPGCHYFEQLHYNDMWLKVGDCVFIKSHGLVRPRVGRIEKVWVRDGAAYFYGPIFIHPEETEHEPTKMFYKKEVFLSNLEETCPMTCILGKCAVLSFKDFLSCRPTEIPENDILLCESRYNESDKQMKKFKGLKRFSLSAKVVDDEIYYFRKPIVPQKEPSPLLEKKIQLLEAKFAELEGGDDDIEEMGEEDSEVIEPPSLPQLQTPLASELDLMPYTPPQSTPKSAKGSAKKEGSKRKINMSGYILFSSEMRAVIKAQHPDYSFGELSRLVGTEWRNLETAKKAEYEGMMGGYPPGLPPLQGPVDGLVSMGSMQPLHPGGPPPHHLPPGVPGLPGIPPPGVMNQGVAPMVGTPAPGGSPYGQQVGVLGPPGQQAPPPYPGPHPAGPPVIQQPTTPMFVAPPPKTQRLLHSEAYLKYIEGLSAESNSISKWDQTLAARRRDVHLSKEQESRLPSHWLKSKGAHTTMADALWRLRDLMLRDTLNIRQAYNLENV

SEQ ID NO: 37 - DNA, 4652 bp, Homo sapiens
  CDS (61)..(3627)
gtgagaactaggagcctgtcctccatgttttataagtattgacattacacagtgttaacaatgcatccacagagcttggctgaagaggaaataaaaacagaacaggaggtggtagagggcatggatatctctactcgctccaaagatcctggctctgcagagagaacagcccagaaaagaaagttccccagccctccacattcttccaatggccactcgccgcaggacacatcaacaagccccattaaaaagaaaaagaaacctggcttactgaacagtaacaataaggagcagtcagaactaagacatggtccgttttactatatgaagcagccactcaccacagaccctgttgatgttgtaccgcaggatggacggaatgatttctactgctgggtttgtcaccgggaaggccaagtcctttgctgtgagctctgtccccgggtttatcacgctaagtgtctgagactgacatcggaaccagagggggactggttttgtcctgaatgtgagaaaattacagtagcagaatgcatcgagacccagagtaaagccatgacaatgctcaccattgaacagttatcctacctgctcaagtttgccattcagaaaatgaaacagccagggacagatgcattccagaagcccgttccattggaacagcaccctgactatgcggaatacatcttccatccaatggacctttgtacattggaaaagaatgcgaaaaagaaaatgtatggctgcacagaagccttcctggctgatgcaaagtggattttgcacaactgcatcatttataatgggggaaatcacaaattgacgcaaatagcgaaagtagtcatcaaaatctgtgaacatgagatgaatgaaatcgaagtatgtccagaatgttatctagctgcttgccaaaaacgagataactggttttgtgagccttgtagcaatccacatcctttggtctgggccaaactgaaggggtttccattctggcctgcaaaagctctaagggataaagacgggcaggtcgatgcccgattctttggacaacatgacagggcctgggttccaataaataattgctacctcatgtctaaagaaattcctttttctgtgaaaaagactaagagcatcttcaacagtgccatgcaagagatggaggtttacgtggagaacatccgcaggaagtttggggtttttaattactctccatttaggacaccctacacacccaacagccagtatcaaatgctgctcgatcccaccaaccccagcgccggcactgccaagatagacaagcaggagaaggtcaagctcaactttgacatgacggcatcccccaagatcctgatgagcaagcctgtgctgagtgggggcacaggccgccggatttccttgtcggatatgccgcgctcccccatgagcacaaactcttctgtgcacacgggctccgacgtggagcaggatgctgagaagaaggccacgtcgagccacttcagtgcgagcgaggagtccatggacttcctggataagagcacagcttcaccagcctccaccaagacgggacaagcagggagtttatccggcagcccaaagcccttctctcctcaactgtcagctcctatcacgacgaaaacggacaaaacctccaccaccggcagcatcctgaatcttaacctggatcgaagcaaagctgagatggatttgaaggagctgagcgagtcggtccagcaacagtccacccctgttcctctcatctctcccaagcgccagattcgtagcaggttccagctgaatcttgacaagaccatagagagttgcaaagcacaattaggcataaatgaaatctcggaagatgtctatacggccgtagagcacagcgattcggaggattctgagaagtcagatagtagcgatagtgagtatatcagtgatgatgagcagaagtctaagaacgagccagaagacacagaggacaaagaaggttgtcagatggacaaagagccatctgctgttaaaaaaaagcccaagcctacaaacccagtggagattaaagaggagctgaaaagcacgtcaccagccagcgagaaggcagaccctggagcagtcaaggacaaggccagccctgagcctgagaaggacttttccgaaaaggcaaaaccttcacctcaccccataaaggataaactgaagggaaaagatgagacggattccccaacagtccatttgggcctggactctgattcagagagcgaacttgtcatagatttaggagaagaccattctgggcgggagggtcgaaaaaataagaaggaacccaaagaaccatctcccaaacaggatgttgtaggtaaaactccaccatccacgacggtgggcagccattctcccccggaaacaccggtgctcacccgctcttccgcccaaacttccgcggctggcgccacagccaccaccagcacgtcctccacggtcaccgtcacggccccggcccccgccgccacaggaagcccagtgaaaaagcagaggccgcttttaccgaaggagactgccccggccgtgcagcgggtcgtgtggaactcatcaactgtccagcagaaggagatcacacagagcccatccacgtccaccatcaccctggtgaccagcacacagtcatcgcccctggtcaccagctcggggtccatgagcacccttgtgtcctcagtcaacgctgacctgcccatcgccactgcctcagctgatgtcgccgctgatattgccaagtacactagcaaaatgatggatgcaataaaaggaacaatgacagaaatatacaacgatctttctaaaaacactactggaagcacaatagctgagattcgcaggctgaggatcgagatagagaagctccagtggctgcaccagcaagagctctccgaaatgaaacacaacttagagctgaccatggcggagatgcggcagagcctggagcaggagcgggaccggctcatcgccgaggtgaagaagcagctggagttggagaagcagcaggcggtggatgagaccaagaagaagcagtggtgcgccaactgcaagaaggaggccatcttttactgctgttggaacactagctactgtgactacccctgccagcaagcccactggcctgagcacatgaagtcctgcacccagtcagctactgctcctcagcaggaagcggatgctgaggtgaacacagaaacactaaataagtcctcccaggggagctcctcgagcacacaatcagcaccttcagaaacggccagcgcctccaaagagaaggagacgtcagctgagaaaagcaaggagagtggctcgacccttgacctttctggctccagagagacgccctcctccattctcttaggctccaaccaaggctctgttagcaaaaggtgtgacaagcaacctgcctatgccccaaccaccacagaccaccagccgcaccccaactaccccgcccagaagtaccattcccggagtaataaatccagttggagcagcagtgatgagaagaggggatcgacacgttccgatcacaacaccagtaccagcacgaagagcctcctcccgaaagagtctcggctggacaccttctgggactagcagtgaatcgggacacaaaccacccaccccattgggagaaaaacccagacgccaggaaaagaagaaacaacaaaggcaggagaacagccactttcagacttgaaaatgacaaaaccctcagttgagcctgagcccccggcgcgggggctgctacactacaggacacccagcatcggctttgactgcagactgttcacccacacgagccctgtgcttttggtgtaaataatgtacaatttgtggatgtcattgaatctagaggactttcccctttttatatttgtattaactttaacttattaaaaaaaaaaaaagaaaaagaaaaacgatttaaaaaaaaaaaaaaaagcaaccaaccccaacaacaaaaaagaatgttttggtattggagaagggatggtcagttagcctgtctgtcacacgacggaatggatactgggcccggggaccactttcatactcacgtcctcatccttggatacccaggggagggcgaaccgttttcgctcgtgtgtctgtacgcagcatgttgggatcgggagtttcggcacagactatcccatcaagccgttggctcctttcagctactacgttaccacgttcctaaaacgcaagctctccggaccagacggacacagggagaagctagtttctttcatgtgattgaaatgatgactctactcctaaaagggaaaaaacaatatccttgtttacagaagagaaacaaacaagccccactcagctcagtcacaggagagaacacagaaagtcttaggatcatgaactctgaaaaaaagagaaaccttatctttgctttgtggttcctttaaacacactcacacacacttggtcagagatgctgtgcttcttggaagcaaggactcaaaggcaaggtgcacgcagaggacgtttgagtctgggatgaagcatgtacgtattatttatatgatggaatttcacgtttttatgtaagcatgaaacacaggcagtatgagagaaagcaaggcccgtcatgctgtccgtac

SEQ ID NO: 38 - protein, 1188 aa, Homo sapiens
MHPQSLAEEEIKTEQEVVEGMDISTRSKDPGSAERTAQKRKFPSPPHSSNGHSPQDTSTSPIKKKKKPGLLNSNNKEQSELRHGPFYYMKQPLTTDPVDVVPQDGRNDFYCWVCHREGQVLCCELCPRVYHAKCLRLTSEPEGDWFCPECEKITVAECIETQSKAMTMLTIEQLSYLLKFAIQKMKQPGTDAFQKPVPLEQHPDYAEYIFHPMDLCTLEKNAKKKMYGCTEAFLADAKWILHNCIIYNGGNHKLTQIAKVVIKICEHEMNEIEVCPECYLAACQKRDNWFCEPCSNPHPLVWAKLKGFPFWPAKALRDKDGQVDARFFGQHDRAWVPINNCYLMSKEIPFSVKKTKSIFNSAMQEMEVYVENIRRKFGVFNYSPFRTPYTPNSQYQMLLDPTNPSAGTAKIDKQEKVKLNFDMTASPKILMSKPVLSGGTGRRISLSDMPRSPMSTNSSVHTGSDVEQDAEKKATSSHFSASEESMDFLDKSTASPASTKTGQAGSLSGSPKPFSPQLSAPITTKTDKTSTTGSILNLNLDRSKAEMDLKELSESVQQQSTPVPLISPKRQIRSRFQLNLDKTIESCKAQLGINEISEDVYTAVEHSDSEDSEKSDSSDSEYISDDEQKSKNEPEDTEDKEGCQMDKEPSAVKKKPKPTNPVEIKEELKSTSPASEKADPGAVKDKASPEPEKDFSEKAKPSPHPIKDKLKGKDETDSPTVHLGLDSDSESELVIDLGEDHSGREGRKNKKEPKEPSPKQDVVGKTPPSTTVGSHSPPETPVLTRSSAQTSAAGATATTSTSSTVTVTAPAPAATGSPVKKQRPLLPKETAPAVQRVVWNSSTVQQKEITQSPSTSTITLVTSTQSSPLVTSSGSMSTLVSSVNADLPIATASADVAADIAKYTSKMMDAIKGTMTEIYNDLSKNTTGSTIAEIRRLRIEIEKLQWLHQQELSEMKHNLELTMAEMRQSLEQERDRLIAEVKKQLELEKQQAVDETKKKQWCANCKKEAIFYCCWNTSYCDYPCQQAHWPEHMKSCTQSATAPQQEADAEVNTETLNKSSQGSSSSTQSAPSETASASKEKETSAEKSKESGSTLDLSGSRETPSSILLGSNQGSVSKRCDKQPAYAPTTTDHQPHPNYPAQKYHSRSNKSSWSSSDEKRGSTRSDHNTSTSTKSLLPKESRLDTFWD

SEQ ID NO: 39 - DNA, 2272 bp, Homo sapiens
  CDS (44)..(1678)
gcgcggccaggactgtctgaggggaagttcgcgagcgctggctatgggtcctggggcgcggctggcggcgctgctggcggtgctggcgctcgggacaggagacccagaaagggctgcggctcggggcgacacgttctcggcgctgaccagcgtggcgcgcgccctggcgcccgagcgccggctgctggggctgctgaggcggtacctgcgcggggaggaggcgcggctgcgggacctgactagattctacgacaaggtactttctttgcatgaggattcaacaacccctgtggctaaccctctgcttgcatttactctcatcaaacgcctgcagtctgactggaggaatgtggtacatagtctggaggccagtgagaacatccgagctctgaaggatggctatgagaaggtggagcaagaccttccagcctttgaggaccttgagggagcagcaagggccctgatgcggctgcaggacgtgtacatgctcaatgtgaaaggcctggcccgaggtgtctttcagagagtcactggctctgccatcactgacctgtacagccccaaacggctcttttctctcacaggggatgactgcttccaagttggcaaggtggcctatgacatgggggattattaccatgccattccatggctggaggaggctgtcagtctcttccgaggatcttacggagagtggaagacagaggatgaggcaagtctagaagatgccttggatcacttggcctttgcttatttccgggcaggaaatgtttcgtgtgccctcagcctctctcgggagtttcttctctacagcccagataataagaggatggccaggaatgtcttgaaatatgaaaggctcttggcagagagccccaaccacgtggtagctgaggctgtcatccagaggcccaatataccccacctgcagaccagagacacctacgaggggctatgtcagaccctgggttcccagcccactctctaccagatccctagcctctactgttcctatgagaccaattccaacgcctacctgctgctccagcccatccggaaggaggtcatccacctggagccctacattgctctctaccatgacttcgtcagtgactcagaggctcagaaaattagagaacttgcagaaccatggctacagaggtcagtggtggcatcaggggagaagcagttacaagtggagtaccgcatcagcaaaagtgcctggctgaaggacactgttgacccaaaactggtgaccctcaaccaccgcattgctgccctcacaggccttgatgtccggcctccctatgcagagtatctgcaggtggtgaactatggcatcggaggacactatgagcctcactttgaccatgctacgtcaccaagcagccccctctacagaatgaagtcaggaaaccgagttgcaacatttatgatctatctgagctcggtggaagctggaggagccacagccttcatctatgccaacctcagcgtgcctgtggttaggaatgcagcactgttttggtggaacctgcacaggagtggtgaaggggacagtgacacacttcatgctggctgtcctgtcctggtgggagataagtgggtggccaacaagtggatacatgagtatggacaggaattccgcagaccctgcagctccagccctgaagactgaactgttggcagagagaagctggtggagtcctgtggctttccagagaagccaggagccaaaagctggggtaggagaggagaaagcagagcagcctcctggaagaaggccttgtcagctttgtctgtgcctcgcaaatcagaggcaagggagaggttgttaccaggggacactgagaatgtacatttgatctgccccagccacggaagtcagagtaggatgcacagtacaaaggaggggggagtggaggcctgagagggaagtttctggagttcagatactctctgttgggaacaggacatctcaacagtctcaggttcgatcagtgggtcttttggcactttgaaccttgaccacagggaccaagaagtggcaatgaggacacctgcaggaggggctagcctgactcccagaactttaagactttctccccactgccttctgctgcagcccaagcagggagtgtccccctcccagaagcatatcccagatgagtggtacattatataaggattttttttaagttgaaaacaactttcttttctttttgtatgatggttttttaacacagtcattaaaaatgtttataaatcaaaa

SEQ ID NO: 40 - protein, 544 aa, Homo sapiens
MGPGARLAALLAVLALGTGDPERAAARGDTFSALTSVARALAPERRLLGLLRRYLRGEEARLRDLTRFYDKVLSLHEDSTTPVANPLLAFTLIKRLQSDWRNVVHSLEASENIRALKDGYEKVEQDLPAFEDLEGAARALMRLQDVYMLNVKGLARGVFQRVTGSAITDLYSPKRLFSLTGDDCFQVGKVAYDMGDYYHAIPWLEEAVSLFRGSYGEWKTEDEASLEDALDHLAFAYFRAGNVSCALSLSREFLLYSPDNKRMARNVLKYERLLAESPNHVVAEAVIQRPNIPHLQTRDTYEGLCQTLGSQPTLYQIPSLYCSYETNSNAYLLLQPIRKEVIHLEPYIALYHDFVSDSEAQKIRELAEPWLQRSVVASGEKQLQVEYRISKSAWLKDTVDPKLVTLNHRIAALTGLDVRPPYAEYLQVVNYGIGGHYEPHFDHATSPSSPLYRMKSGNRVATFMIYLSSVEAGGATAFIYANLSVPVVRNAALFWWNLHRSGEGDSDTLHAGCPVLVGDKWVANKWIHEYGQEFRRPCSSSPED

SEQ ID NO: 41 - DNA, 8588 bp, Homo sapiens
  CDS (481)..(7953)
gagtagctccagcggccacgctgaggcgagggtgacacaccatgctcacggcccctggagaccgtcgtgctggcgagccgtgctccgtagctccccggtccgcctcggcagcggtcagagtcgcctacaggagttgagccgcccgcgccagaaggttttggcgaagctcttggagaggcgtcgagcacagtagggcggcgggggtgcgttgagcgctcgggggtcaggcagtcggccgggatcgccgctggggagcgtttccgaggcgaggaggaggaggaggagatgctgctcctcttctccccctccccaggctccttctacagctccttcagcccacgcccgcagccgcttgtgggagaagtggtggtggctctcggcgcccgcggcggctgccggcggcccgccccgacgccgcgtccctgcagccctcgcccggcgctccagtagcaggacccggtctcgggaccagccggtaatatgcacgtgtcactagctgaggccctggaggttcggggtggaccacttcaggaggaagaaatatgggctgtattaaatcaaagtgctgaaagtctccaagaattattcagaaaagtaagcctagctgatcctgctgcccttggcttcatcatttctccatggtctctgctgttgctgccatctggtagtgtgtcatttacagatgaaaatatttccaatcaggatcttcgagcattcactgcaccagaggttcttcaaaatcagtcactaacttctctctcagatgttgaaaagatccacatttattctcttggaatgacactgtattggggggctgattatgaagtgcctcagagccaacctattaagcttggagatcatctcaacagcatactgcttggaatgtgtgaggatgttatttacgctcgagtttctgttcggactgtgctggatgcttgcagtgcccacattaggaatagcaattgtgcaccctcattttcctacgtgaaacacttggtaaaactggttctgggaaatctttctgggacagatcagctttcctgtaacagtgaacaaaagcctgatcgaagccaggctattcgagatcgattgcgaggaaaaggattaccaacaggaagaagctctacttctgatgtactagacatacaaaagcctccactctctcatcagacctttcttaacaaagggcttagtaaatctatgggatttctgtccatcaaagatacacaagatgagaattatttcaaggacattttatcagataattctggacgtgaagattctgaaaatacattctccccttaccagttcaaaactagtggcccagaaaaaaaacccatccctggcattgatgtgctttctaagaagaagatctgggcttcatccatggacttgctttgtacagctgacagagacttctcttcaggagagactgccacatatcgtcgttgtcaccctgaggcagtaacagtgcggacttcaactactcctagaaaaaaggaggcaagatactcagatggaagtatagccttggatatctttggccctcagaaaatggatccaatatatcacactcgagaattgcccacctcctcagcaatatcaagtgctttggaccgaatccgagagagacaaaagaaacttcaggttctgagggaagccatgaatgtagaagaaccagttcgaagatacaaaacttatcatggtgatgtctttagtacctccagtgaaagtccatctattatttcctctgaatcagatttcagacaagtgagaagaagtgaagcctcaaagaggtttgaatccagcagtggtctcccaggggtagatgaaaccttaagtcaaggccagtcacagagaccgagcagacaatatgaaacaccctttgaaggcaacttaattaatcaagagatcatgctaaaacggcaagaggaagaactgatgcagctacaagccaaaatggcccttagacagtctcggttgagcctatatccaggagacacaatcaaagcgtccatgcttgacatcaccagggatccgttaagagaaattgccctagaaacagccatgactcaaagaaaactgaggaatttctttggccctgagtttgtgaaaatgacaattgaaccatttatatctttggatttgccacggtctattcttactaagaaagggaagaatgaggataaccgaaggaaagtaaacataatgcttctgaacgggcaaagactggaactgacctgtgataccaaaactatatgtaaagatgtgtttgatatggttgtggcacatattggcttagtagagcatcatttgtttgctttagctaccctcaaagataatgaatatttctttgttgatcctgacttaaaattaaccaaagtggccccagagggatggaaagaagaaccaaagaaaaagaccaaagccactgttaattttactttgtttttcagaattaaattttttatggatgatgttagtctaatacaacatactctgacgtgtcatcagtattaccttcagcttcgaaaagatattttggaggaaaggatgcactgtgatgatgagacttccttattgctggcatccttggctctccaggctgagtatggagattatcaaccagaggttcatggtgtgtcttactttagaatggagcactatttgcccgccagagtgatggagaaacttgatttatcctatatcaaagaagagttacccaaattgcataatacctatgtgggagcttctgaaaaagagacagagttagaatttttaaaggtctgccaaagactgacagaatatggagttcattttcaccgagtgcaccctgagaagaagtcacaaacaggaatattgcttggagtctgttctaaaggtgtccttgtgtttgaagttcacaatggagtgcgcacattggtccttcgctttccatggagggaaaccaagaaaatatctttttctaaaaagaaaatcacattgcaaaatacatcagatggaataaaacatggcttccagacagacaacagtaagatatgccagtacctgctgcacctctgctcttaccagcataagttccagctacagatgagagcaagacagagcaaccaagatgcccaagatattgagagagcttcgtttaggagcctgaatctccaagcagagtctgttagaggatttaatatgggacgagcaatcagcactggcagtctggccagcagcaccctcaacaaacttgctgttcgacctttatcagttcaagctgagattctgaagaggctatcctgctcagagctgtcgctttaccagccattgcaaaacagttcaaaagagaagaatgacaaagcttcatgggaggaaaagcctagagagatgagtaaatcataccatgatctcagtcaggcctctctctatccacatcggaaaaatgtcattgttaacatggaacccccaccacaaaccgttgcagagttggtgggaaaaccttctcaccagatgtcaagatctgatgcagaatctttggcaggagtgacaaaacttaataattcaaagtctgttgcgagtttaaatagaagtcctgaaaggaggaaacatgaatcagactcctcatccattgaagaccctgggcaagcatatgttctaggaatgactatgcatagttctggaaactcttcatcccaagtacccttaaaagaaaatgatgtgctacacaaaagatggagcatagtatcttcaccagaaagggagatcaccttagtgaacctgaaaaaagatgcaaagtatggcttgggatttcaaattattggtggggagaagatgggaagactggacctaggcatatttatcagttcagttgcccctggaggaccagctgacttggatggatgcttgaagccaggagaccgtttgatatctgtgaatagtgtgagtctggagggagtcagccaccatgctgcaattgaaattttgcaaaatgcacctgaagatgtgacacttgttatctctcagccaaaagaaaagatatccaaagtgccttctactcctgtgcatctcaccaatgagatgaaaaactacatgaagaaatcttcctacatgcaagacagtgctatagattcttcttccaaggatcaccactggtcacgtggtaccctgaggcacatctcggagaactcctttgggccatctgggggcctgcgggaaggaagcctgagttctcaagattccaggactgagagtgccagcttgtctcaaagccaggtcaatggtttctttgccagccatttaggtgaccaaacctggcaggaatcacagcatggcagcccttccccatctgtaatatccaaagccaccgagaaagagactttcactgatagtaaccaaagcaaaactaaaaagccaggcatttctgatgtaactgattactcagaccgtggagattcagacatggatgaagccacttactccagcagtcaggatcatcaaacaccaaaacaggaatcttcctcttcagtgaatacatccaacaagatgaattttaaaactttttcttcatcacctcctaagcctggagatatctttgaggttgaactggctaaaaatgataacagcttggggataagtgtcacggtactgtttgacaagggaggtgtgaatacgagtgtcagacatggtggcatttatgtgaaagctgttattccccagggagcagcagagtctgatggtagaattcacaaaggtgatcgcgtcctagctgtcaatggagttagtctagaaggagccacccataagcaagctgtggaaacactgagaaatacaggacaggtggttcatctgttattagaaaagggacaatctccaacatctaaagaacatgtcccggtaaccccacagtgtaccctttcagatcagaatgcccaaggtcaaggcccagaaaaagtgaagaaaacaactcaggtcaaagactacagctttgtcactgaagaaaatacatttgaggtaaaattatttaaaaatagctcaggtctaggattcagtttttctcgagaagataatcttataccggagcaaattaatgccagcatagtaagggttaaaaagctctttcctggacagccagcagcagaaagtggaaaaattgatgtaggagatgttatcttgaaagtgaatggagcctctttgaaaggactatctcagcaggaagtcatatctgctctcaggggaactgctccagaagtattcttgcttctctgcagacctccacctggtgtgctaccggaaattgatactgcgcttttgaccccacttcagtctccagcacaagtacttccaaacagcagtaaagactcttctcagccatcatgtgtggagcaaagcaccagctcagatgaaaatgaaatgtcagacaaaagcaaaaaacagtgcaagtccccatccagaagagacagttacagtgacagcagtgggagtggagaagatgacttagtgacagctccagcaaacatatcaaattcgacctggagttcagctttgcatcagactctaagcaacatggtatcacaggcacagagtcatcatgaagcacccaagagtcaagaagataccatttgtaccatgttttactatcctcagaaaattcccaataaaccagagtttgaggacagtaatccttcccctctaccaccggatatggctcctgggcagagttatcaaccccaatcagaatctgcttcctctagttcgatggataagtatcatatacatcacatttctgaaccaactagacaagaaaactggacacctttgaaaaatgacttggaaaatcaccttgaagactttgaactggaagtagaactcctcattaccctaattaaatcagaaaaaggaagcctgggttttacagtaaccaaaggcaatcagagaattggttgttatgttcatgatgtcatacaggatccagccaaaagtgatggaaggctaaaacctggggaccggctcataaaggttaatgatacagatgttactaatatgactcatacagatgcagttaatctgctccgggctgcatccaaaacagtcagattagttattggacgagttctagaattacccagaataccaatgttgcctcatttgctaccggacataacactaacgtgcaacaaagaggagttgggtttttccttatgtggaggtcatgacagcctttatcaagtggtatatattagtgatattaatccaaggtccgtcgcagccattgagggtaatctccagctattagatgtcatccattatgtgaacggagtcagcacacaaggaatgaccttggaggaagttaacagagcattagacatgtcacttccttcattggtattgaaagcaacaagaaatgatcttccagtggtccccagctcaaagaggtctgctgtttcagctccaaagtcaaccaaaggcaatggttcctacagtgtggggtcttgcagccagcctgccctcactcctaatgattcattctccacggttgctggggaagaaataaatgaaatatcgtaccccaaaggaaaatgttctacttatcagataaagggatcaccaaacttgactctgcccaaagaatcttatatacaagaagatgacatttatgatgattcccaagaagctgaagttatccagtctctgctggatgttgtggatgaggaagcccagaatcttttaaacgaaaataatgcagcaggatactcctgtggtccaggtacattaaagatgaatgggaagttatcagaagagagaacagaagatacagactgcgatggttcacctttacctgagtattttactgaggccaccaaaatgaatggctgtgaagaatattgtgaagaaaaagtaaaaagtgaaagcttaattcagaagccacaagaaaagaagactgatgatgatgaaataacatggggaaatgatgagttgccaatagagagaacaaaccatgaagattctgataaagatcattcctttctgacaaacgatgagctcgctgtactccctgtcgtcaaagtgcttccctctggtaaatacacgggtgccaacttaaaatcagtcattcgagtcctgcggggtttgctagatcaaggaattccttctaaggagctggagaatcttcaagaattaaaacctttggatcagtgtctaattgggcaaactaaggaaaacagaaggaagaacagatataaaaatatacttccctatgatgctacaagagtgcctcttggagatgaaggtggctatatcaatgccagcttcattaagataccagttgggaaagaagagttcgtttacattgcctgccaaggaccactgcctacaactgttggagacttctggcagatgatttgggagcaaaaatccacagtgatagccatgatgactcaagaagtagaaggagaaaaaatcaaatgccagcgctattggcccaacatcctaggcaaaacaacaatggtcagcaacagacttcgactggctcttgtgagaatgcagcagctgaagggctttgtggtgagggcaatgacccttgaagatattcagaccagagaggtgcgccatatttctcatctgaatttcactgcctggccagaccatgatacaccttctcaaccagatgatctgcttacttttatctcctacatgagacacatccacagatcaggcccaatcattacgcactgcagtgctggcattggacgttcagggaccctgatttgcatagatgtggttctgggattaatcagtcaggatcttgattttgacatctctgatttggtgcgctgcatgagactacaaagacacggaatggttcagacagaggatcaatatattttctgctatcaagtcatcctttatgtcctgacacgtcttcaagcagaagaagagcaaaaacagcagcctcagcttctgaagtgacatgaaaagagcctctggatgcatttccatttctctccttaacctccagcagactcctgctctctatccaaaataaagatcacagagcagcaagttcatacaacatgcatgttctcctctatcttagaggggtattcttcttgaaaataaaaaatattgaaatgctgtatttttacagctactttaacctatgataattatttacaaaattttaacactaaccaaacaatgcagatcttagggatgattaaaggcagcatttgatgatagcagacattgttacaaggacatggtgagtctatttttaatgcaccaatcttgtttatagcaaaaatgttttccaatattttaataaagtagttattttataggggatacttgaaaccagtatttaagctttaaatgacagtaatattggcatagaaaaaagtagcaaatgtttactgtatcaatttctaatgtttactatatagaatttcctgtaatatatttatatactttttcatgaaaatggagttatcagttatctgtttgttactgcatcatctgtttgtaatcattatctcactttgtaaataaaaacacaccttaaaacatgaacaagccaaaactgtgtgcagacaaaaaaaaaaaaa

SEQ ID NO: 42 - protein, 2490 aa, Homo sapiens
MHVSLAEALEVRGGPLQEEEIWAVLNQSAESLQELFRKVSLADPAALGFIISPWSLLLLPSGSVSFTDENISNQDLRAFTAPEVLQNQSLTSLSDVEKIHIYSLGMTLYWGADYEVPQSQPIKLGDHLNSILLGMCEDVIYARVSVRTVLDACSAHIRNSNCAPSFSYVKHLVKLVLGNLSGTDQLSCNSEQKPDRSQAIRDRLRGKGLPTGRSSTSDVLDIQKPPLSHQTFLNKGLSKSMGFLSIKDTQDENYFKDILSDNSGREDSENTFSPYQFKTSGPEKKPIPGIDVLSKKKIWASSMDLLCTADRDFSSGETATYRRCHPEAVTVRTSTTPRKKEARYSDGSIALDIFGPQKMDPIYHTRELPTSSAISSALDRIRERQKKLQVLREAMNVEEPVRRYKTYHGDVFSTSSESPSIISSESDFRQVRRSEASKRFESSSGLPGVDETLSQGQSQRPSRQYETPFEGNLINQEIMLKRQEEELMQLQAKMALRQSRLSLYPGDTIKASMLDITRDPLREIALETAMTQRKLRNFFGPEFVKMTIEPFISLDLPRSILTKKGKNEDNRRKVNIMLLNGQRLELTCDTKTICKDVFDMVVAHIGLVEHHLFALATLKDNEYFFVDPDLKLTKVAPEGWKEEPKKKTKATVNFTLFFRIKFFMDDVSLIQHTLTCHQYYLQLRKDILEERMHCDDETSLLLASLALQAEYGDYQPEVHGVSYFRMEHYLPARVMEKLDLSYIKEELPKLHNTYVGASEKETELEFLKVCQRLTEYGVHFHRVHPEKKSQTGILLGVCSKGVLVFEVHNGVRTLVLRFPWRETKKISFSKKKITLQNTSDGIKHGFQTDNSKICQYLLHLCSYQHKFQLQMRARQSNQDAQDIERASFRSLNLQAESVRGFNMGRAISTGSLASSTLNKLAVRPLSVQAEILKRLSCSELSLYQPLQNSSKEKNDKASWEEKPREMSKSYHDLSQASLYPHRKNVIVNMEPPPQTVAELVGKPSHQMSRSDAESLAGVTKLNNSKSVASLNRSPERRKHESDSSSIEDPGQAYVLGMTMHSSGNSSSQVPLKENDVLHKRWSIVSSPEREITLVNLKKDAKYGLGFQIIGGEKMGRLDLGIFISSVAPGGPADLDGCLKPGDRLISVNSVSLEGVSHHAAIEILQNAPEDVTLVISQPKEKISKVPSTPVHLTNEMKNYMKKSSYMQDSAIDSSSKDHHWSRGTLRHISENSFGPSGGLREGSLSSQDSRTESASLSQSQVNGFFASHLGDQTWQESQHGSPSPSVISKATEKETFTDSNQSKTKKPGISDVTDYSDRGDSDMDEATYSSSQDHQTPKQESSSSVNTSNKMNFKTFSSSPPKPGDIFEVELAKNDNSLGISVTVLFDKGGVNTSVRHGGIYVKAVIPQGAAESDGRIHKGDRVLAVNGVSLEGATHKQAVETLRNTGQVVHLLLEKGQSPTSKEHVPVTPQCTLSDQNAQGQGPEKVKKTTQVKDYSFVTEENTFEVKLFKNSSGLGFSFSREDNLIPEQINASIVRVKKLFPGQPAAESGKIDVGDVILKVNGASLKGLSQQEVISALRGTAPEVFLLLCRPPPGVLPEIDTALLTPLQSPAQVLPNSSKDSSQPSCVEQSTSSDENEMSDKSKKQCKSPSRRDSYSDSSGSGEDDLVTAPANISNSTWSSALHQTLSNMVSQAQSHHEAPKSQEDTICTMFYYPQKIPNKPEFEDSNPSPLPPDMAPGQSYQPQSESASSSSMDKYHIHHISEPTRQENWTPLKNDLENHLEDFELEVELLITLIKSEKGSLGFTVTKGNQRIGCYVHDVIQDPAKSDGRLKPGDRLIKVNDTDVTNMTHTDAVNLLRAASKTVRLVIGRVLELPRIPMLPHLLPDITLTCNKEELGFSLCGGHDSLYQVVYISDINPRSVAAIEGNLQLLDVIHYVNGVSTQGMTLEEVNRALDMSLPSLVLKATRNDLPVVPSSKRSAVSAPKSTKGNGSYSVGSCSQPALTPNDSFSTVAGEEINEISYPKGKCSTYQIKGSPNLTLPKESYIQEDDIYDDSQEAEVIQSLLDVVDEEAQNLLNENNAAGYSCGPGTLKMNGKLSEERTEDTDCDGSPLPEYFTEATKMNGCEEYCEEKVKSESLIQKPQEKKTDDDEITWGNDELPIERTNHEDSDKDHSFLTNDELAVLPVVKVLPSGKYTGANLKSVIRVLRGLLDQGIPSKELENLQELKPLDQCLIGQTKENRRKNRYKNILPYDATRVPLGDEGGYINASFIKIPVGKEEFVYIACQGPLPTTVGDFWQMIWEQKSTVIAMMTQEVEGEKIKCQRYWPNILGKTTMVSNRLRLALVRMQQLKGFVVRAMTLEDIQTREVRHISHLNFTAWPDHDTPSQPDDLLTFISYMRHIHRSGPIITHCSAGIGRSGTLICIDVVLGLISQDLDFDISDLVRCMRLQRHGMVQTEDQYIFCYQVILYVLTRLQAEEEQKQQPQLLK

SEQ ID NO: 43 - DNA, 1683 bp, Homo sapiens
  CDS (86)..(1591)
cgcgctctctcgctctcagggcccccctcgctcccccggccgcagtccgtgcgcgagggcgccggcgagccgtctcggaagcagcatgcaggcgcgctactccgtgtccgaccccaacgccctgggagtggtgccctacctgagcgagcagaattactaccgggctgcgggcagctacggcggcatggccagccccatgggcgtctattccggccacccggagcagtacagcgcggggatgggccgctcctacgcgccctaccaccaccaccagcccgcggcgcctaaggacctggtgaagccgccctacagctacatcgcgctcatcaccatggccatccagaacgcgcccgagaagaagatcaccttgaacggcatctaccagttcatcatggaccgcttccccttctaccgggagaacaagcagggctggcagaacagcatccgccacaacctctcgctcaacgagtgcttcgtcaaggtgccccgcgacgacaagaagcccggcaagggcagttactggaccctggacccggactcctacaacatgttcgagaacggcagcttcctgcggcgccggcggcgcttcaaaaagaaggacgtgtccaaggagaaggaggagcgggcccacctcaaggagccgcccccggcggcgtccaagggcgccccggccaccccccacctagcggacgcccccaaggaggccgagaagaaggtggtgatcaagagcgaggcggcgtccccggcgctgccggtcatcaccaaggtggagacgctgagccccgagagcgcgctgcagggcagcccgcgcagcgcggcctccacgcccgccggctcccccgacggctcgctgccggagcaccacgccgcggcgcccaacgggctgcctggcttcagcgtggagaacatcatgaccctgcgaacgtcgccgccgggcggagagctgagcccgggggccggacgcgcgggcctggtggtgccgccgctggcgctgccctacgccgccgcgccgcccgccgcctacggccagccgtgcgctcagggcctggaggccggggccgccgggggctaccagtgcagcatgcgagcgatgagcctgtacaccggggccgagcggccggcgcacatgtgcgtcccgcccgccctggacgaggccctctcggaccacccgagcggccccacgtcgcccctgagcgctctcaacctcgccgccggccaggagggcgcgctcgccgccacgggccaccaccaccagcaccacggccaccaccacccgcaggcgccgccgcccccgccggctccccagccccagccgacgccgcagcccggggccgccgcggcgcaggcggcctcctggtatctcaaccacagcggggacctgaaccacctccccggccacacgttcgcggcccagcagcaaactttccccaacgtgcgggagatgttcaactcccaccggctggggattgagaactcgaccctcggggagtcccaggtgagtggcaatgccagctgccagctgccctacagatccacgccgcctctctatcgccacgcagccccctactcctacgactgcacgaaatactgacgtgtcccgggacctcccctccccggcccgctccggcttcgcttcccagccccgacccaaccagacaattaaggggctgcagagacgcaaaa

SEQ ID NO: 44 - protein, 501 aa, Homo sapiens
MQARYSVSDPNALGVVPYLSEQNYYRAAGSYGGMASPMGVYSGHPEQYSAGMGRSYAPYHHHQPAAPKDLVKPPYSYIALITMAIQNAPEKKITLNGIYQFIMDRFPFYRENKQGWQNSIRHNLSLNECFVKVPRDDKKPGKGSYWTLDPDSYNMFENGSFLRRRRRFKKKDVSKEKEERAHLKEPPPAASKGAPATPHLADAPKEAEKKVVIKSEAASPALPVITKVETLSPESALQGSPRSAASTPAGSPDGSLPEHHAAAPNGLPGFSVENIMTLRTSPPGGELSPGAGRAGLVVPPLALPYAAAPPAAYGQPCAQGLEAGAAGGYQCSMRAMSLYTGAERPAHMCVPPALDEALSDHPSGPTSPLSALNLAAGQEGALAATGHHHQHHGHHHPQAPPPPPAPQPQPTPQPGAAAAQAASWYLNHSGDLNHLPGHTFAAQQQTFPNVREMFNSHRLGIENSTLGESQVSGNASCQLPYRSTPPLYRHAAPYSYDCTKY

SEQ ID NO: 45 - DNA, 1271 bp, Homo sapiens
  CDS (75)..(905)
accgtagcgacgccgcggtccgccggatctccagcgctcagtccgcgccgcaggtggtgcttgtctgcagagtcatgacctctttccgcttggccctcatccagcttcagatttcttccatcaaatcagataacgtcactcgcgcttgtagcttcatccgggaggcagcaacgcaaggagccaaaatagtttctttgccggaatgctttaattctccatatggagcgaaatattttcctgaatatgcagagaaaattcctggtgaatccacacagaagctttctgaagtagcaaaggaatgcagcatatatctcattggaggctctatccctgaagaggatgctgggaaattatataacacctgtgctgtgtttgggcctgatggaactttactagcaaagtatagaaagatccatctgtttgacattgatgttcctggaaaaattacatttcaagaatctaaaacattgagtccgggtgatagtttctccacatttgatactccttactgcagagtgggtctgggcatctgctacgacatgcggtttgcagagcttgcacaaatctacgcacagagaggctgccagctgttggtatatccaggagcttttaatctgaccactggaccagcccattgggagttacttcagcgaagccgggctgttgataatcaggtgtatgtggccacagcctctcctgcccgggatgacaaagcctcctatgttgcctggggacacagcaccgtggtgaacccttggggggaggttctagccaaagctggcacagaagaagcaatcgtgtattcagacatagacctgaagaagctggctgaaatacgccagcaaatccccgtttttagacagaagcgatcagacctctatgctgtggagatgaaaaagccctaaagtttatgtttctaatgtgtcacagaataggacgatatgattctacaacataatcaactccctattaaattctttaatgaagattttttttttaattcggccttgtccttcctaggttctctattgagatgagaaagcctcattatgctgacattttccacgccacattaaatagttaaaaaggatgcagcctggagccagagagcagaaagctgggctggttctgaagcttcttccatacttaagttgcctccaagcagtttgtgaaagtatcagatcttggtatcctggtgattgattcacctaatataaatatatttgtgtcatgaacctcttatcccgttgctggagttgtaatctccatca

SEQ ID NO: 46 - protein, 276 aa, Homo sapiens
MTSFRLALIQLQISSIKSDNVTRACSFIREAATQGAKIVSLPECFNSPYGAKYFPEYAEKIPGESTQKLSEVAKECSIYLIGGSIPEEDAGKLYNTCAVFGPDGTLLAKYRKIHLFDIDVPGKITFQESKTLSPGDSFSTFDTPYCRVGLGICYDMRFAELAQIYAQRGCQLLVYPGAFNLTTGPAHWELLQRSRAVDNQVYVATASPARDDKASYVAWGHSTVVNPWGEVLAKAGTEEAIVYSDIDLKKLAEIRQQIPVFRQKRSDLYAVEMKKP

SEQ ID NO: 47 - DNA, 7830 bp, Homo sapiens
  CDS (22)..(6213)
cccggagtgagttacgccactatggcggacggggcaccccggccccagctttaccgcagcgtctcgttcaagctgctggagcgctggagcggcggccccgggctgagggaggaggacacggacacccccggcttgaggcgacgcgcctcgtgccggccgaccacggctgcccggggccagccctctcggcgcgtgtccaagctggcgtctgggcccctggccgcccccgcgcagccgcgcccgctccgcagcctctcgccgtcggttcgccagctctcccggcgcttcgacgcgccgcgtctggacgacggctccgctgggacccgagacggaggcgtcttacccgcggccgcggaagaagcggccgagggcccagcgcgaggagcctggcccagcgtcaccgagatgcgcaagctcttcggcggtcctggctccaggaggcccagcgccgactctgaatccccaggaacgcccagccccgacggtgccgcgtgggagcctccggctcgggagtcgcggcagccaccgacgccaccccctcggacatgcttccccctggcgggtctgcgttcggcgcggcccctgaccgggccggagaccgaagggaggctgcgccggccgcagcagcaacaggagcgggcgcagcgtccagcggatggtttacattcttggcatatcttctcccaaccgcaggccggggcccgggcctcctgctcctcctcctccatcgccgcctcctatcctgtcagccgcagtcgtgctgccagctccagcgaggaggaagaggagggcccgccgcagctgcctggagcccagagtccggcctaccacggcggccactcctcgggcagtgacgacgaccgagacggtgagggcggccaccgctggggagggaggcccgggctcaggcctggaagctccctattggatcaggactgcaggcctgacagtgatgggttaaatctaagcagcatgaactcagcaggggtttctgggagccctgagcccccaacatctccaagagcccctagagaagaaggactccgggagtggggtagtggctctccgccctgcgtcccaggtccccaggagggacttcggcctatgtctgactctgtgggaggagctttccgtgtggccaaggtgagctttccctcgtacctggccagccccgcaggctcccgcggtagcagccgttattccagcacggagaccctcaaggacgacgacctatggtctagtaggggttctgggggctggggcgtgtaccgctcccctagctttggagctggggaagggctcctgcggtcccaggctcgaacccgtgccaaaggacctggaggcacctctagggcattgagggatggaggatttgagcctgaaaagagtcgacagcggaagtccctgtcaaatccagatatcgcctcagagaccctgacgcttctcagtttcctgcgctcagacctttcagagctgagggtccgaaaacctggtgggagctccggggaccgtggaagcaaccccctagatggcagagactcaccatccgcaggtggccctgtggggcaacttgaacccatacccatcccagccccagcatcacctggcacgcgccccacactcaaggacttgacagccactctgcggagagcaaagtcattcacctgctctgagaagcccatggcccgccgcctgccccgcaccagtgctctgaagtccagctcctccgagctcctgctcacaggccctggtgccgaggaggatccgctgcccctcatcgtccaggaccaatatgtgcaggaggcccgccaggtttttgagaagatccagcgcatgggtgcccaacaagatgatggaagcgatgccccccctggaagccctgactgggcaggggatgtgacccgagggcagcggtcccaggaggagctctcaggccctgagtccagtctgacagatgaaggcattggggcagaccctgagcctcctgttgcagcattttgcggcctgggtaccacagggatgtggcgacctctttcctcatcctcggcccagacgaaccaccatggccctgggactgaggacagtctgggcgggtgggccctggtgtcgcctgagacccctcccacaccaggtgccctccgccgacgacgcaaagtcccaccttcaggttctggtgggagcgaattgagcaatggggaggcaggggaggcctacaggtccctgagtgacccaattcctcagcgccaccgggctgccacctctgaagagcctactgggttctctgtggacagcaacctcctgggctcactgagccccaagacagggctccctgccacctcagccatggatgagggcttgaccagtggtcacagtgactggtctgtgggcagtgaagagagcaagggatatcaggaggttattcagagcatagttcaggggcctggcaccctggggcgtgtggtggacgacaggattgctggcaaagcccccaagaagaaatccctgagtgaccccagccgccgtggggagctggctgggcctggattcgagggccctggaggggagcccatccgagaagttgagcccatgctgcctccatccagcagcgagcccatccttgtagagcagcgggcagagccagaagaacctggtgccaccaggagccgggcacagtctgaaagggccctacctgaggctctgcctccccctgccactgcccaccgaaactttcaccttgaccccaagctggctgacattctgtccccgaggctaatccgccgaggctccaagaagcgcccagctcggagtagtcaccaggagcttcggagagacgagggcagtcaggaccagactggcagcctgtctcgggcccggccctcctccagacacgttcgccatgccagtgtgcccgccacatttatgcctattgtggtgcctgagccaccaacttctgttggtccccctgtggctgtgccagaacccataggcttccctacccgagcccatcccacgttgcaggcaccatcgctcgaggacgtcaccaagcagtacatgctgaacctgcactccggtgaggtccctgccccagtgccagtggacatgccctgcttgcctctggctgcaccgccctctgctgaggccaagccccctgaggcagctcggcctgcagatgagcctacccctgccagcaagtgctgcagcaagccacaggtggacatgcggaagcacgtggccatgaccctgctggacacagagcagtcgtatgtggagtcgctgcgcaccctgatgcagggctacatgcagccgctgaagcagccagagaactccgtgctctgtgacccttcactggtggacgagatcttcgaccagatccccgagctcctggagcaccacgagcaattcctggagcaggttcggcactgcatgcagacctggcatgcccagcagaaggtgggagccctgctcgtccagtcgttctccaaggatgtcctagtaaacatctattctgcctatatcgataacttcctcaatgcaaaggatgctgtgcgtgtggccaaggaggcgaggcctgcctttctcaagttcctagagcaaagcatgcgtgagaacaaggagaagcaggcgctgtctgacctcatgatcaagcctgtgcagcggatcccacgctacgagcttctggtgaaggacctcctgaagcatacacctgaggaccacccggaccatccactcctgctggaggcgcagcggaacatcaagcaggtggctgagcgcatcaacaagggtgtgcggagtgccgaggaggcggagcgccatgcccgtgtgctgcaggagatagaggctcacatcgagggcatggaggatctccaggcccctctgcggcggttcctgagacaggagatggtcattgaagtgaaggcgatcggtggcaagaaggaccggtctctcttcctgttcacggacctcatcgtctgcaccactctgaagcgaaagtcaggctccctgcggcgcagctccatgagcctgtacacggcagccagtgtcattgacacagccagcaagtacaagatgctgtggaagctgccgctggaagacgcagacatcatcaaaggggcatcccaagccaccaatcgggagaacatccagaaggccatcagccgccttgatgaggacctcaccaccctgggccaaatgagcaagctctctgagagccttggtttcccccaccagagcctggacgatgcactgcgggacctctcagctgccatgcaccgggacctgtcggagaagcaggcgctgtgctacgcgctttccttcccgccaaccaagctggagctgtgcgccactcggcccgagggcaccgactcctacatttttgagttccctcaccctgacgcccgccttggttttgaacaggccttcgatgaggccaagaggaagctggcatccagcaaaagctgtctagaccctgagttcctgaaggccatccccatcatgaaaacccgcagtggcatgcagttctcctgtgcggctcccaccctgaacagctgcccggagccctcgcctgaggtatgggtctgcaacagcgacggctacgtgggccaggtgtgcctgctgagcctgcgcgccgagccggacgtggaggcctgcatcgccgtctgttccgcccgcatcctctgcatcggggcggtgcccgggctgcagcctcgctgccaccgggagcctcctccgtcgctgaggagtcctccagagacggcaccggagcccgccgggccggagctggacgtcgaggccgctgcagacgaggaagccgcgacgctcgcggagccggggccgcagccctgccttcacatctccattgcaggctcgggcttggagatgacgccgggcctcggcgagggtgacccccgcccagagctggtgccctttgacagtgactctgacgatgagtcttcgcccagcccctcggggacgctgcagagccaggccagccggtccaccatctcctccagctttggcaatgaggagaccccgagttccaaggaggccacggcagagaccaccagctcagaggaggagcaggagccaggcttcctgccactgtctggctcctttgggcctggtggtccctgcggcaccagcccaatggatgggagagcccttcgccgctccagccacggctccttcacccggggcagccttgaggacctgctgagtgtcgaccctgaggcctaccagagctccgtgtggctgggcactgaggatggctgtgtccacgtgtaccagtcctccgacagcatccgtgaccgcaggaacagcatgaagctccagcatgcggcctctgtgacctgcatcttgtatctgaataaccaggtgtttgtgtctctggccaatggagagcttgtggtctaccaaagggaagcaggccatttctgggacccccagaacttcaaatcagtgaccttgggcacccaggggagccccatcaccaagatggtatctgtgggtgggcggctgtggtgtggctgccagaaccgagtccttgtcctgagccctgacacgctgcagctggagcacatgttttacgtgggtcaggattcaagccgctgcgtggcttgcatggtggactccagcctgggtgtgtgggtgacattgaaaggtagtgcccacgtgtgtctctaccatccagacacctttgagcagctggcagaagtagacgtcactcctcccgtgcacaggatgctggcaggctcggatgccatcatccggcagcacaaggctgcctgtctgcgaatcacagcgctgctggtgtgtgaggagctgctgtgggtgggcaccagtgctggtgtcgtcctcaccatgcccacttcgcccggtactgtcagctgcccacgggcaccactcagtcccacaggcctcggccagggacacaccggccacgtccgcttcttggctgcagtccagctgccagatggcttcaacctgctctgcccaaccccaccacctcccccagacacaggccccgagaagctgccatcactggagcaccgggactccccttggcaccgaggccccgcccctgccaggcctaaaatgctggttatcagtggaggtgatggctatgaggacttccgactcagcagtgggggcggcagcagcagtgagactgtgggtcgagacgacagcacaaaccacctcctcctgtggagggtgtgaccctgtctgccgtggcccaggactcgcccgcccacctgccttcagcctgcttgcctctccctagcccacacgcagactttgaccaggagtatccagccaggggcacacatgtgcctgcgtgggctctgccttgtcttcgcggaagcattcctgatggaacacccactggccagccaggccatggcttctcccgaccctctggctgccccggtgcttccagtcatgatcgggtgggggacatgtgggctgaccaggacctctgaccctggagcttctaccaaagacacagctgggtctggaccccacggggctggggagggccatgtgcaatatttggagggttttctggagggcagcaggaaggctggggaattccccatgtacagtatttatgtttctttttagatgtgtaccttcccaagcacttatttatgcagtgacctggtcacctggggtgggggtgatttgaggaaatgacatgaggaaaagaaacctattcctgccctggggaccaccctgggactctaaccaagccttcctggagggacccatgcgcccctgagccccattccattcatacagacacacacgtacgcacactgcatgtccaaggccctaaacattgcccgttgacataaactttccagggccccagcctgatggggctgccctcagtcctctagatcaagatgctgactattagggggcagtgattgccatctggggacctgtcaggctttgtcatttcccagtttgttggtggtgcctttagtggttccctaatttgggaacactgatggggccttggacagggctttctctcaggtaggagaaatgggcccatgatctcctcacagtcgcccccagtccttggccctgcttccctgtgtctcatgcactggcacatatggtcaccttggagggcagacctaggagcccctctgaccactgaatccgtctccacaccccttctgccaagggaagccccttcaggaaggaccccccaaagctgaggggctgaatgtagccttttcaacagagaaggctcccacttgagagcagcctctacctgaccccctggaccacagagagccactctgaccctcagccccctcgcttcttcagctaaaactccaaaggtttggtttcagatggggtttgttttgttctgtttggttttggttttgtttggggtgggtgggtcattgcggtcttagattatgtttctcttgctaccaaacagtcatgtattaactctctttggatgatgaagtttaaagagtcaataaatagaaacaccagatgactgcattggtggccacagtggcctcctgtcagcaacctcagggctcagtctccctggccacatgggccttccgacgtccacacacttgggaagaagggaggccttggagacccagaagagtgctggacggcgaggttgccacgatttgctgtgttacctgggcaggtggctgggctgcagtttcctcatcaggaaaataaaggggttgtaccagttcagtgctttgtaaccagggttacatggtagaatcccttgcagatgacatgtaaatgcagaaacatgattcgtaacttaaaaaaaaaaaaaaaaaa

SEQ ID NO: 48 - protein, 2063 aa, Homo sapiens
MADGAPRPQLYRSVSFKLLERWSGGPGLREEDTDTPGLRRRASCRPTTAARGQPSRRVSKLASGPLAAPAQPRPLRSLSPSVRQLSRRFDAPRLDDGSAGTRDGGVLPAAAEEAAEGPARGAWPSVTEMRKLFGGPGSRRPSADSESPGTPSPDGAAWEPPARESRQPPTPPPRTCFPLAGLRSARPLTGPETEGRLRRPQQQQERAQRPADGLHSWHIFSQPQAGARASCSSSSIAASYPVSRSRAASSSEEEEEGPPQLPGAQSPAYHGGHSSGSDDDRDGEGGHRWGGRPGLRPGSSLLDQDCRPDSDGLNLSSMNSAGVSGSPEPPTSPRAPREEGLREWGSGSPPCVPGPQEGLRPMSDSVGGAFRVAKVSFPSYLASPAGSRGSSRYSSTETLKDDDLWSSRGSGGWGVYRSPSFGAGEGLLRSQARTRAKGPGGTSRALRDGGFEPEKSRQRKSLSNPDIASETLTLLSFLRSDLSELRVRKPGGSSGDRGSNPLDGRDSPSAGGPVGQLEPIPIPAPASPGTRPTLKDLTATLRRAKSFTCSEKPMARRLPRTSALKSSSSELLLTGPGAEEDPLPLIVQDQYVQEARQVFEKIQRMGAQQDDGSDAPPGSPDWAGDVTRGQRSQEELSGPESSLTDEGIGADPEPPVAAFCGLGTTGMWRPLSSSSAQTNHHGPGTEDSLGGWALVSPETPPTPGALRRRRKVPPSGSGGSELSNGEAGEAYRSLSDPIPQRHRAATSEEPTGFSVDSNLLGSLSPKTGLPATSAMDEGLTSGHSDWSVGSEESKGYQEVIQSIVQGPGTLGRVVDDRIAGKAPKKKSLSDPSRRGELAGPGFEGPGGEPIREVEPMLPPSSSEPILVEQRAEPEEPGATRSRAQSERALPEALPPPATAHRNFHLDPKLADILSPRLIRRGSKKRPARSSHQELRRDEGSQDQTGSLSRARPSSRHVRHASVPATFMPIVVPEPPTSVGPPVAVPEPIGFPTRAHPTLQAPSLEDVTKQYMLNLHSGEVPAPVPVDMPCLPLAAPPSAEAKPPEAARPADEPTPASKCCSKPQVDMRKHVAMTLLDTEQSYVESLRTLMQGYMQPLKQPENSVLCDPSLVDEIFDQIPELLEHHEQFLEQVRHCMQTWHAQQKVGALLVQSFSKDVLVNIYSAYIDNFLNAKDAVRVAKEARPAFLKFLEQSMRENKEKQALSDLMIKPVQRIPRYELLVKDLLKHTPEDHPDHPLLLEAQRNIKQVAERINKGVRSAEEAERHARVLQEIEAHIEGMEDLQAPLRRFLRQEMVIEVKAIGGKKDRSLFLFTDLIVCTTLKRKSGSLRRSSMSLYTAASVIDTASKYKMLWKLPLEDADIIKGASQATNRENIQKAISRLDEDLTTLGQMSKLSESLGFPHQSLDDALRDLSAAMHRDLSEKQALCYALSFPPTKLELCATRPEGTDSYIFEFPHPDARLGFEQAFDEAKRKLASSKSCLDPEFLKAIPIMKTRSGMQFSCAAPTLNSCPEPSPEVWVCNSDGYVGQVCLLSLRAEPDVEACIAVCSARILCIGAVPGLQPRCHREPPPSLRSPPETAPEPAGPELDVEAAADEEAATLAEPGPQPCLHISIAGSGLEMTPGLGEGDPRPELVPFDSDSDDESSPSPSGTLQSQASRSTISSSFGNEETPSSKEATAETTSSEEEQEPGFLPLSGSFGPGGPCGTSPMDGRALRRSSHGSFTRGSLEDLLSVDPEAYQSSVWLGTEDGCVHVYQSSDSIRDRRNSMKLQHAASVTCILYLNNQVFVSLANGELVVYQREAGHFWDPQNFKSVTLGTQGSPITKMVSVGGRLWCGCQNRVLVLSPDTLQLEHMFYVGQDSSRCVACMVDSSLGVWVTLKGSAHVCLYHPDTFEQLAEVDVTPPVHRMLAGSDAIIRQHKAACLRITALLVCEELLWVGTSAGVVLTMPTSPGTVSCPRAPLSPTGLGQGHTGHVRFLAAVQLPDGFNLLCPTPPPPPDTGPEKLPSLEHRDSPWHRGPAPARPKMLVISGGDGYEDFRLSSGGGSSSETVGRDDSTNHLLLWRV

SEQ ID NO: 49 - DNA, 3673 bp, Homo sapiens
  CDS (379)..(2484)
accactgcctgcaggttggcgccaccacccccactctccccgctgctcgcgggagccagagggccctgcggtcctcggtggtcttgccagcccctcgtcatcccagggccctccgcgcctgtgaggactccctcagcgtgcaaacagcaggctcagcccaggctccagggtgtcctgggcacctggtgtcctgggagcaaagtctttgcctaacgtcgctgagaagaatgtttaaagtgaaagtacattggagtctgcaaacaggacagacccgaggcctcacgtgggaccagtcaggcctctaagcaccgcctccctaacgccacggtgttttccgagatcaagggaaaggtcggccacgggacctgacgcaacaggatggacgagtcccctgagcctctgcagcagggcagagggccggtgccggtccgacggcagcgcccagcaccccggggtctgcgtgagatgctgaaggccaggctgtggtgcagctgctcgtgcagtgtgctgtgcgtccgggcgctggtgcaggacctgctccccgccacgcgctggctgcgtcagtaccgcccgcgggagtacctggcaggcgacgtcatgtctgggctggtcatcggcatcatcctggtgccgcaggccatcgcctactcattgctggccgggctgcagcccatctacagcctctatacgtccttcttcgccaacctcatctacttcctcatgggcacctcacggcatgtctccgtgggcatcttcagcctgctttgcctcatggtggggcaggtggtggaccgggagctccagctggccggctttgacccctcccaggacggcctgcagcccggagccaacagcagcaccctcaacggctcggctgccatgctggactgcgggcgtgactgctacgccatccgtgtcgccaccgccctcacgctgatgaccgggctttaccaggtcctcatgggcgtcctccggctgggcttcgtgtccgcctacctctcacagccactgctcgatggctttgccatgggggcctccgtgaccatcctgacctcgcagctcaaacacctgctgggcgtgcggatcccgcggcaccaggggcccggcatggtggtcctcacatggctgagcctgctgcgcggcgccgggcaggccaacgtgtgcgacgtggtcaccagcacggtgtgcctggcggtgctgctagccgcgaaggagctctcagaccgctaccgacaccgcctgagggtgccgctgcccacggagctgctggtcatcgtggtggccacactcgtgtcgcacttcgggcagctccacaagcgctttggctcgagcgtggctggcgacatccccacgggtttcatgccccctcaggtcccagagcccaggctgatgcagcgtgtggctttggatgccgtggccctggccctcgtggctgccgccttctccatctcgctggcggagatgttcgcccgcagtcacggctactctgtgcgtgccaaccaggagctgctggctgtgggctgctgcaacgtgctacccgccttcctccactgcttcgccaccagcgccgccctggccaagagcctggtgaagacagccactggctgccggacacagctgtccagcgtggtcagcgccaccgtggtgctgctggtgctgctggcgctggcaccgctgttccacgacctacagcgaagcgtgctggcctgcgtcatcgtggtcagcctgcggggggccctgcgcaaggtgtgggacctcccgcggctgtggcggatgagcccggctgacgcgctggtctgggcaggcaccgcggccacctgtatgctggtcagcacagaggccgggctgctggctggcgtcatcctctcgctgctcagcctggccggccgcacccaacgcccacgcaccgccctgctggcccgcatcggggacacggccttctacgaggatgccacagagttcgagggcctcgtccctgagcccggcgtgcgggtgttccgctttggggggccgctgtactatgccaacaaggacttcttcctgcagtcactctacagcctcacggggctggacgcagggtgcatggctgccaggaggaaggaggggggctcagagacgggggtcggtgagggaggccctgcccagggcgaggacctgggcccggttagcaccagggctgcgctggtgcccgcagcggccggcttccacacagtggtcatcgactgcgccccgctgctgttcctagacgcagccggtgtgagcacgctgcaggacctgcgccgagactacggggccctgggcatcagcctgctgctagcctgctgcagcccgcctgtgagagacattctgagcagaggaggcttcctcggggagggccccggggacacggctgaggaggagcagctgttcctcagtgtgcacgatgccgtgcagacagcacgagcccgccacagggagctggaggccaccgatgcccatctgtagcagggccaggcctgcccagcagcctctgctccctcctggggacccacagcagacgtctgcaagccactgctgagacccttcccagggaggagccacccaagagctgcactcttgtgccacagctgccctggggaaaccggggaaccccaactgggaaaggaggccctctgatcacacgcaggacccaaacactcagaaatcaagaacctctgcctccgagacaggctggcccacagtgctggctgggccccaatgcaccgtccctcagctcaggagggatgggcctgacctgacgctcagggttgacatcttatttgaacaagggtcccccgccatcatgcagcctccaaggtgccaagaggactccctatgcccaggcctgcccggtgcccaccctgctggtaggagccagcggctctggccaagtgcacgagggtctctgtgtttccagaaggccccacacacccaagtgcccctcacacctcgtgcctccccctcacagggtggccacctgcaccagcgtcagggcccagggtgctgtgaccgatgagacctcagctcagccctcaggtgcagtggccctacccagcctggccagcagacacacacagggatgctcacgggtgcaccaggagccaggtgcggcgcagccaaccctgagcctgcagggagacctgcaggaagcccaccgtgccccatgcaggggctccctccagcacacagccctcaccccagcacagccagcaaggacacgctctccccaacagggtgcttcggcgggaggtgggggaacaaggggtcttccgagcagcccccagccctcccctcccatctgtgcctctgtaaggggctctgggacgcccagaccctgcccgccgcccacctggtggtgacaagctccagcagccagtgggtccggacctgcttgatgccgcggtgagggacggcgcccacataggcgaggttgagctgctggtcccagctgaggacgtactggtcagcctggctgtgtggcagcggggggctggggacaacaaaggggcggctcagtcccgagcctcagcatggctggcagcgcggctgacacacacgttcaagcccaggactgcccgggcgcaggatccaggcgctgcccgtgcgttcagtgactaataaaatgacccttagggccaggaaaaaaaaaaaaaaa

SEQ ID NO: 50 - protein, 701 aa, Homo sapiens
MDESPEPLQQGRGPVPVRRQRPAPRGLREMLKARLWCSCSCSVLCVRALVQDLLPATRWLRQYRPREYLAGDVMSGLVIGIILVPQAIAYSLLAGLQPIYSLYTSFFANLIYFLMGTSRHVSVGIFSLLCLMVGQVVDRELQLAGFDPSQDGLQPGANSSTLNGSAAMLDCGRDCYAIRVATALTLMTGLYQVLMGVLRLGFVSAYLSQPLLDGFAMGASVTILTSQLKHLLGVRIPRHQGPGMVVLTWLSLLRGAGQANVCDVVTSTVCLAVLLAAKELSDRYRHRLRVPLPTELLVIVVATLVSHFGQLHKRFGSSVAGDIPTGFMPPQVPEPRLMQRVALDAVALALVAAAFSISLAEMFARSHGYSVRANQELLAVGCCNVLPAFLHCFATSAALAKSLVKTATGCRTQLSSVVSATVVLLVLLALAPLFHDLQRSVLACVIVVSLRGALRKVWDLPRLWRMSPADALVWAGTAATCMLVSTEAGLLAGVILSLLSLAGRTQRPRTALLARIGDTAFYEDATEFEGLVPEPGVRVFRFGGPLYYANKDFFLQSLYSLTGLDAGCMAARRKEGGSETGVGEGGPAQGEDLGPVSTRAALVPAAAGFHTVVIDCAPLLFLDAAGVSTLQDLRRDYGALGISLLLACCSPPVRDILSRGGFLGEGPGDTAEEEQLFLSVHDAVQTARARHRELEATDAHL

SEQ ID NO: 51 - DNA, 1956 bp, Homo sapiens
  CDS (14)..(1465)
ctactgtgaggggatgaaggtgctccctgcatctggccttgctgtcttcctcatcatggctttgaagttttccactgcagccccctccctagttgcagcctcccccaggacctggaggaacaactaccgcctcgcacaggcgtatcttgacaaatattacacaaataaagaaggacaccagattggtgagatggttgcaagaggaagcaattccatgataaggaagattaaggagctacaagcgttctttggcctccaagtcaccgggaagttagaccagaccacaatgaacgtgatcaagaagcctcgctgtggagttcctgatgtggccaattatcgcctcttccctggtgaacccaaatggaaaaaaaatactttgacatacagaatatctaaatacacaccttccatgagttctgtcgaggtggacaaagcagtggagatggccttgcaggcctggagtagcgccgtccctctgagctttgtcagaataaactcaggagaagcggatattatgatatcttttgaaaatggagatcacggggattcctatccattcgatgggcctcgggggactctagcccatgcatttgctcctggagaaggcctgggaggagatacacatttcgacaatgctgagaagtggactatgggaacgaatggttttaatttgtttaccgttgctgctcatgaatttggccatgccctgggcctggcccattccacagacccatcagcactgatgtacccaacttataagtacaagaatccctatggattccacctccccaaagatgatgtgaaagggatccaggcattatacggacctcggaaagtattcctggggaagcccactctgccccatgccccccatcacaagccatccatccctgacctctgtgactccagctcatcctttgacgctgtgacaatgctggggaaggagctcctgctcttcaaggaccggattttctggagacggcaggttcacttgcggacaggaattcggcccagcactattaccagctccttcccccagctcatgtccaatgtggatgcagcttacgaagtggctgagaggggcactgcttacttcttcaaaggtccccactactggataacaagaggattccaaatgcaaggtcctcctcggactatttatgactttggatttccaaggcacgtgcagcaaatagatgctgctgtctacctcagggagccacagaagacccttttctttgtgggagatgaatactacagctacgacgaaaggaaaaggaaaatggaaaaagactatccaaagaatactgaagaagaattttcaggagtaaatggccaaatcgatgctgctgtagaattaaatggctacatttacttcttttcaggaccaaaaacatacaagtatgacacagagaaggaagatgtggttagtgtggtgaaatctagttcctggattggttgctaaatagaaaagcctagtcttctcaagcaatgaggatgactacaagcagcctctaactggatcttaaggactaaagcagaatgtaggagagggattcttccaaaggccttcaaatcaaattagaattcactgagaataataatacttccaatttttttcatagttgtataatcagaatttcaatccacattagaaaagtttttatatgggcaactttatgcgaaatccaaatcaacacaatgcactctgcagttagacaccattattttttcttacctaatatactgaagcagattgatccgtttgatttttatttccaggaggaagactagtggtggattccatgacatatattgtaattcttttcataggaaatgtcattacagtatgaattataattatttacaagcaatggcttttgtggccatcatttggccatcatttgttataataaatataaatttcccaatttttacttaaaagacatcacaaca

SEQ ID NO: 52 - protein, 483 aa, Homo sapiens
MKVLPASGLAVFLIMALKFSTAAPSLVAASPRTWRNNYRLAQAYLDKYYTNKEGHQIGEMVARGSNSMIRKIKELQAFFGLQVTGKLDQTTMNVIKKPRCGVPDVANYRLFPGEPKWKKNTLTYRISKYTPSMSSVEVDKAVEMALQAWSSAVPLSFVRINSGEADIMISFENGDHGDSYPFDGPRGTLAHAFAPGEGLGGDTHFDNAEKWTMGTNGFNLFTVAAHEFGHALGLAHSTDPSALMYPTYKYKNPYGFHLPKDDVKGIQALYGPRKVFLGKPTLPHAPHHKPSIPDLCDSSSSFDAVTMLGKELLLFKDRIFWRRQVHLRTGIRPSTITSSFPQLMSNVDAAYEVAERGTAYFFKGPHYWITRGFQMQGPPRTIYDFGFPRHVQQIDAAVYLREPQKTLFFVGDEYYSYDERKRKMEKDYPKNTEEEFSGVNGQIDAAVELNGYIYFFSGPKTYKYDTEKEDVVSVVKSSSWIGC

SEQ ID NO: 53 - DNA, 1318 bp, Homo sapiens
  CDS (222)..(884)
agcccagtcgccgccgcccgcccacaaagccacaggcaggtgcaggcgcagccgcggcgagagcgtatggagccgagccgttagcgcgcgccgtcggtgagtcagtccgtccgtccgtccgtccgtcggggcgccgcagctcccgccaggcccagcggccccggcccctcgtctccccgcacccggagccacccggtggagcgggccttgccgcggcagccatgtccatgggcctggagatcacgggcaccgcgctggccgtgctgggctggctgggcaccatcgtgtgctgcgcgttgcccatgtggcgcgtgtcggccttcatcggcagcaacatcatcacgtcgcagaacatctgggagggcctgtggatgaactgcgtggtgcagagcaccggccagatgcagtgcaaggtgtacgactcgctgctggcactgccacaggaccttcaggcggcccgcgccctcatcgtggtggccatcctgctggccgccttcgggctgctagtggcgctggtgggcgcccagtgcaccaactgcgtgcaggacgacacggccaaggccaagatcaccatcgtggcaggcgtgctgttccttctcgccgccctgctcaccctcgtgccggtgtcctggtcggccaacaccattatccgggacttctacaaccccgtggtgcccgaggcgcagaagcgcgagatgggcgcgggcctgtacgtgggctgggcggccgcggcgctgcagctgctggggggcgcgctgctctgctgctcgtgtcccccacgcgagaagaagtacacggccaccaaggtcgtctactccgcgccgcgctccaccggcccgggagccagcctgggcacaggctacgaccgcaaggactacgtctaagggacagacgcagggagaccccaccaccaccaccaccaccaacaccaccaccaccaccgcgagctggagcgcgcaccaggccatccagcgtgcagccttgcctcggaggccagcccacccccagaagccaggaagcccccgcgctggactggggcagcttccccagcagccacggctttgcgggccgggcagtcgacttcggggcccagggaccaacctgcatggactgtgaaacctcacccttctggagcacggggcctgggtgaccgccaatacttgaccaccccgtcgagccccatcgggccgctgcccccatgctcgcgctgggcagggaccggcagccctggaaggggcacttgatatttttcaataaaagcctttcgttttgcaaaaaaaaaaaaaaaaaaaaaaaaaaaaaaaaaaaaaaaaaaaaa

SEQ ID NO: 54 - protein, 220 aa, Homo sapiens
MSMGLEITGTALAVLGWLGTIVCCALPMWRVSAFIGSNIITSQNIWEGLWMNCVVQSTGQMQCKVYDSLLALPQDLQAARALIVVAILLAAFGLLVALVGAQCTNCVQDDTAKAKITIVAGVLFLLAALLTLVPVSWSANTIIRDFYNPVVPEAQKREMGAGLYVGWAAAALQLLGGALLCCSCPPREKKYTATKVVYSAPRSTGPGASLGTGYDRKDYV

SEQ ID NO: 55 - DNA, 1297 bp, Homo sapiens
  CDS (128)..(853)
gtgagagccaggcgtccctctgcctgcccactcagtggcaacacccgggagctgttttgtcctttgtggagcctcagcagttccctctttcagaactcactgccaagagccctgaacaggagccaccatgcagtgcttcagcttcattaagaccatgatgatcctcttcaatttgctcatctttctgtgtggtgcagccctgttggcagtgggcatctgggtgtcaatcgatggggcatcctttctgaagatcttcgggccactgtcgtccagtgccatgcagtttgtcaacgtgggctacttcctcatcgcagccggcgttgtggtctttgctcttggtttcctgggctgctatggtgctaagactgagagcaagtgtgccctcgtgacgttcttcttcatcctcctcctcatcttcattgctgaggttgcagctgctgtggtcgccttggtgtacaccacaatggctgagcacttcctgacgttgctggtagtgcctgccatcaagaaagattatggttcccaggaagacttcactcaagtgtggaacaccaccatgaaagggctcaagtgctgtggcttcaccaactatacggattttgaggactcaccctacttcaaagagaacagtgcctttcccccattctgttgcaatgacaacgtcaccaacacagccaatgaaacctgcaccaagcaaaaggctcacgaccaaaaagtagagggttgcttcaatcagcttttgtatgacatccgaactaatgcagtcaccgtgggtggtgtggcagctggaattgggggcctcgagctggctgccatgattgtgtccatgtatctgtactgcaatctacaataagtccacttctgcctctgccactactgctgccacatgggaactgtgaagaggcaccctggcaagcagcagtgattgggggaggggacaggatctaacaatgtcacttgggccagaatggacctgccctttctgctccagacttggggctagatagggaccactccttttaggcgatgcctgactttccttccattggtgggtggatgggtggggggcattccagagcctctaaggtagccagttctgttgcccattcccccagtctattaaacccttgatatgccccctaggcctagtggtgatcccagtgctctactgggggatgagagaaaggcattttatagcctgggcataagtgaaatcagcagagcctctgggtggatgtgtagaaggcacttcaaaatgcataaacctgttacaatgttaaaaaaaaaaaaaaaaaaa

SEQ ID NO: 56 - protein, 241 aa, Homo sapiens
MQCFSFIKTMMILFNLLIFLCGAALLAVGIWVSIDGASFLKIFGPLSSSAMQFVNVGYFLIAAGVVVFALGFLGCYGAKTESKCALVTFFFILLLIFIAEVAAAVVALVYTTMAEHFLTLLVVPAIKKDYGSQEDFTQVWNTTMKGLKCCGFTNYTDFEDSPYFKENSAFPPFCCNDNVTNTANETCTKQKAHDQKVEGCFNQLLYDIRTNAVTVGGVAAGIGGLELAAMIVSMYLYCNLQ

SEQ ID NO: 57 - DNA, 1206 bp, Homo sapiens
  CDS (143)..(727)
tacgcgccttggggtccgggtcggctttccccgggacccctggccggaaactgagccgttcacttccgccaccagccggaagttttctgtcactggacgccaaggagttttcggtggctcagctgggtaaccggggatcaccatggcggcctcattggtggggaagaagatcgtgtttgtaacggggaacgccaagaagctggaggaggtcgttcagattctaggagataagtttccatgcactttggtggcacagaaaattgacctgccggagtaccagggggagccggatgagatttccatacagaaatgtcaggaggcagttcgccaggtacaggggcccgtgctggttgaggacacttgtctgtgcttcaatgcccttggagggctccccggcccctacataaagtggtttctggagaagttaaagcctgaaggtctccaccagctcctggccgggttcgaggacaagtcagcctatgcgctctgcacgtttgcactcagcaccggggacccaagccagcccgtgcgcctgttcaggggccggacctcgggccggatcgtggcacccagaggctgccaggactttggctgggacccctgctttcagcctgatggatatgagcagacgtacgcagagatgcctaaggcggagaagaacgctgtctcccatcgcttccgggccctgctggagctgcaggagtactttggcagtttggcagcttgacttctgcagctggaggaggcccctcaggccggggatctggggagggctagcccaaaacctcccgcatcgggcaggcaccccctgaagtacttccttcagggtttcccctttgtgagggtgtcgagtagcctcaccggcctgtctggaggagcagctggctctgctctgagaaactctggcaagtggacgccattctcttgcccttaggattcactgctctctcctacagccgccaggcctggggtcctgaaaggaccttgggtggtaaagctgtacttggtgggagtgagggcgtggggaggaaccatgcaaatcgccttccatggtttttaaatgcagtaaataacatttctggatgagacttgtttccaaaataaaccagctatatctgttttgaaaaaaaaaaaaaaaaaaaaaaaaaaaaaaaaaaaaaaaaaaaaaaaaaaaaaaaaaaaaaaaaaaaaaaaaaaaaaaaaaaa

SEQ ID NO: 58 - protein, 194 aa, Homo sapiens
MAASLVGKKIVFVTGNAKKLEEVVQILGDKFPCTLVAQKIDLPEYQGEPDEISIQKCQEAVRQVQGPVLVEDTCLCFNALGGLPGPYIKWFLEKLKPEGLHQLLAGFEDKSAYALCTFALSTGDPSQPVRLFRGRTSGRIVAPRGCQDFGWDPCFQPDGYEQTYAEMPKAEKNAVSHRFRALLELQEYFGSLAA

SEQ ID NO: 59 - DNA, 972 bp, Homo sapiens
  CDS (19)..(969)
tttcctccgattaaattaatgttccaaactcaaaagaaaaacaactcagctcaggcatcaccttgcctggaaggcttccctagtcctcctgcctcccgcagacttgtctggcaccctgtgcatttgggatttggcacactatgtctcatctgcggcctccactggacgatgagacctgttcttggggaagatcccgacttagccattttccagtggcacctcttccaccatgagttcctgaggcagtccgatggggctactttattccagaacaatcacagtgagaccttttctcccaataaatgccccttttctctccttaatatattctcttgcttacaaaacactggtgtctccttatcatggatttcctttgttttgcctccttgcctggtgctttcagcgagcagcgctgacgtcatctcaggaaccgtgctgcgtctgagagaagaacctgcagcccagcgagcagcaccggtgattgatgatactacagcgcatcccaggagctggtatcccagggcagcgctgcacctgctggcagccaaacccttcggggcaggacaccggcccacagcctcggagcgcccagttccaaccatcaattttaattcttgtgtggtgtcagcacagcggcaggtcaccgttcaggaaggacccttgtaccgcacggagggctcccacatcactatctggtgcaatgtgagtggctaccagggaccttctgaacagaatttccagtggtccatttacctgccttcgtcgccagagcgagaggtgcagatcgtcagcaccatggactcttccttcccctatgccatctacacccagcgcgtccgcggagggaagatcttcatagaaagagtccaggggaacccaaccctattgcacatcacagatcttcaggcccgggatgccggggaatatgaatgccacacacccagcaccgagaagcaatactttgggagttaa

SEQ ID NO: 60 - protein, 317 aa, Homo sapiens
MFQTQKKNNSAQASPCLEGFPSPPASRRLVWHPVHLGFGTLCLICGLHWTMRPVLGEDPDLAIFQWHLFHHEFLRQSDGATLFQNNHSETFSPNKCPFSLLNIFSCLQNTGVSLSWISFVLPPCLVLSASSADVISGTVLRLREEPAAQRAAPVIDDTTAHPRSWYPRAALHLLAAKPFGAGHRPTASERPVPTINFNSCVVSAQRQVTVQEGPLYRTEGSHITIWCNVSGYQGPSEQNFQWSIYLPSSPEREVQIVSTMDSSFPYAIYTQRVRGGKIFIERVQGNPTLLHITDLQARDAGEYECHTPSTEKQYFGS

SEQ ID NO: 61 - DNA, 6246 bp, Homo sapiens
  CDS (415)..(5658)
gacttaaactctggggcccgggaggccgccggttttctccccgcttgccggggtggtcctcttccctttgtcggaccaaagaagtaaacactgtgtggagagggactgacgtgtttggagggaaatgggaatgtacacgataattaaagagtaaagttgtgctcaacgctgtttacttctaattatttcctgattcacaaattaatttttgcaattcacaacttcaagaatacttggactattggattcaatccatagtaatctgcaaaagaagagaagcagaattatacctagaagtctactaatggacagttagtcacccacctacatgttgagattcctgacattcagacaactgacttgtaactgacttataactgacttgtaatacactgctactatatcaaaccgacaatgaattggaatgaaaaaccaaagagtgctacattaccaccactgtatcctaaaagccagccaccttttttgcaccagtctttaataaaccaaattaccacaacatctcagagttctttcagctatcctggaagtaaccaagaagcatgcatgtatcccggtaattcaaatccaatttcacagccactgctgaatatccaaaattatcctcaacaaatttctgtttctgatatgcataatgggacagttgtggcctcacacacttcagtagaaagaataacatatgcaaatgttaatggacccaaacaactaactcacaatttgcagatgtcttcaggagttacccaaaatgtatggttgaactcaccaatgaggaatcctgtgcattctcatataggggcaactgtatctcatcaaactgattttggagctaacgtacccaatatgccggcactacagagtcaactgataacatcagatacctattctatgcaaatgcagatgatcccttctaattctacacgacttcctgtagcttaccaaggaaatcagggacttaaccagtctttttcagagcaacaggttgattggacacaacagtgtatatctaagggactgacttacccagattacagaccacctccaaagctataccgttactcaccacaaagctttttaccagattctaccattcaaaaacaaaactttataccacatacatcattgcaagttaaaaatagtcagcttccaaattctgtattaactttaccatcaaggcagacctcagctgtaccatcacagcagtatgccacgcaaactgacaaaagacctcctcctcctccttacaactgtagatatggaagccagcctttgcaaagtactcagcatattactaaacacttgtctatggaagttcctcagagtcgagaaatgctgtcatctgaaataaggaccagctttcaacagcagtggcaaaaccctaatgaaaatgtcagcacaattggaaatttcactaacttgaaagtaaataccaacagcaaacagccttttaacagtcccattagatcttctgtggatggtgttcagactcttgctcaaactaatgaagagaaaataatggattcttgcaatccaacttcaaatcaagtactggacacaagtgttgcaaaagaaaagctagtaagggatattaaaacattagtagagataaaacagaagttttcagaacttgcaaggaaaattaaaatcaataaagatcttttgatggcagcaggttgtattaaaatgactaatacttcttatagtgaaccagctcagaattctaaattgtctctaaaacaaactgccaaaatccagtctggaccccagataactccagtaatgccagagaatgcagagagacaaacaccaacagtagtggaatctgcagaaacaaataagactcaatgtatgttgaattctgacattcaggaagtcaattgcagaaggtttaaccaagttgattctgttttaccaaatcctgtctattctgaaaagcggccaatgccagacccatctcatgatgtgaaagttctcacttcaaagacatcagctgttgagatgacccaggcagtattgaatactcagctttcatcagaaaatgttaccaaagttgagcaaaattcaccagcagtttgtgaaacaatttctgttcccaagtccatgtccactgaggaatataaatcaaaaattcaaaatgaaaatatgctacttctcgctttgctttcacaggcacgtaagactcagaagacagtattaaaagatgctaatcaaactattcaggattctaaaccagacagttgtgaaatgaatccaaatacccaaatgactggtaaccaactgaatttgaagaacatggaaactccaagtacttctaatgtaagtggcagggttttggacaactccttttgcagtggacaagaatcctcaacaaaaggaatgcctgctaaaagtgacagtagctgttccatggaagtgctagcaacctgtctttccctgtggaaaaagcaaccttcagatactgcaaaagaaaaggagtgtgataaactcagaacaaacacaacagcagttggaatttcaaagcctgctaacatccacgttaagagtccttgttcagttgtgggaaattcaaattctcagaataaaataagtaatccctcacagcagacagctttgtcgatggtaatgcacaattatgagtcttcaggtataaatataacaaagggaacagaacttcagatagctgtagtgtcaccgttagttctgtcagaggtcaaaacattgtctgtcaaaggaataacacctgcagtgttacctgaaacagtgtatcccgttattaaagaaggcagtgtttgtagtttacaaaatcaattggcagaaaatgcaaaggcaactgctgctttgaaagttgatgttagtggaccagtagcaagtacagcaacatcaaccaagatttttccactaactcagaaggaaaagcagaatgagtcaactaatggtaattcagaagtcacacctaatgtcaatcaaggaaagcataacaaattagagtcagctatccattctcctatgaacgatcagcaaatctcacaggagtcaaggaatagtactgttgtgagtagtgatacattacagattgacaatatttgttctctggttgaaggtgatacctcttacaattcccaaatagcaaagatattcagctctcttcccttgaaaatggttgagccacagaaaccttctctacccaatcagcaagggattggcagcagagaaccagaaaaacaattagataataccactgaaaataaagactttggttttcaaaaagataaacctgtacagtgcacagatgtttcacataaaatatgtgatcagtcaaagtcagagccacccttagagtcatcttttaacaatcttgaaacaaacagagttattctagagaaaagtagtttggagcatgccactgaaaaaagcacagctaacgatacgtgctcgtcagctgctattcaggaggatatttaccctcaggaaatagatgcatccagcaactatactccccaagatcctgcaagaaatgaaatccacagtgataaggcacctgtcttatacctacatgaccagctgtcagaacttctaaaagagtttccttatggcattgaggctgtgaatacacgtgaaggttctgtgggccagcaaactacataccagacctcagaagatcaaactgctgataaaaccagttctgactccaaagacccagcagatcaaatacaaattacaatattaagctcagagcaaatgaaagaaatatttcctgaacaggatgatcaaccctatgtagtagacaagttggcagaacctcagaaagaagagcccatcacagaagtagttagccagtgtgacctgcaggcacctgcagctggacaaagtcgtgattctgtgatactggactctgagaaagatgatatccactgctgtgcattgggctggctctccatggtttacgaaggagtaccccagtgtcagtgtaattccatcaagaactcatcttcagaggaagagaaacaaaaagagcagtgttctcctttggataccaacagttgtaaacaaggagagagaacttctgatagagatgtcactgttgttcaatttaagagccttgtaaataatccaaagactcctccagatgggaaaagtcattttcctgaactacaagacgacagtagaaaagatacacccaaaacaaaacataaaagcttaccaaggacagaacaagaattagttgctggtcagttttcatctaaatgtgataaactaaatcccttgcaaaatcacaaaagaaaaaaattgaggtttcacgaggtaacctttcactccagtaataaaatgacagcatcttatgaacaagcttctcaggaaacccgacagaagaaacatgtaacacagaactcacgtccactaaaaacaaaaacagcttttttgccaaataaagatgtgtataagaagcatagttctttgggacagtcattatcaccagaaaagataaaattgaaactcaaatcagttagcttcaaacaaaaacgaaagttagaccaagggaacgtattagatatggaagtaaagaaaaagaaacatgataaacaagaacagaaaggaagtgtgggagctacattcaaattaggtgactctttgtcaaacccaaacgaaagagccattgttaaagaaaagatggtatcaaatactaagtctgtagacacgaaagcgagttcatctaaatttagtagaattctaactcctaaggagtatttacaaaggcagaagcataaagaagctctgagtaataaagcatcgaagaaaatctgtgtgaaaaacgtgccatgtgattctgaacatatgagaccaagtaaacttgccgtgcaggttgaaagttgtgggaaatcaaatgagaaacacagcagcggcgtgcagacctctaaagaatcattaaatggcttgacaagccatggtaaaaacctcaaaatccaccattctcaggagtctaaaacatacaacattctaaggaatgttaaagaaaaagttggtgggaagcagcctgataaaatatggattgataagactaaattagacaaattaaccaatataagcaacgaagctcaattcagccaaatgcctccccaagtaaaggatcaaaagaaattatatctgaatagagttgggtttaaatgcactgaacgtgaaagcatttctctcaccaaattagaaagttcacccaggaagcttcataaagataagagacaggaaaataaacataagacctttttaccggtgaaaggtaacacagaaaaatcaaacatgctggagtttaaattatgtccagatatcttactaaagaatacaaactctgtggaagaacggaaggatgtaaagcctcatcctaggaaggagcaagcccctctgcaagtttcaggaataaaaagtacaaaagaagactggttaaaatttgttgctacaaagaaaaggacacagaaagacagccaagagagagataatgttaattcaagactctcgaagagaagcttcagtgcagatggatttgagatgctacaaaacccagtaaaagattcaaaagaaatgtttcaaacctacaaacagatgtacctggagaagagaagcagaagccttggtagcagtcctgtaaaataattacaagatgtggttttgtaattgccactgggaaatttctttccttttctgttcaaaatatttcgctgaaactaatgagaaatgccatgataaagatttctcagagtttggttcccactttcattgtatttcattgaaagtgcttaattaaaatggcttgagaactttgggtagccatgtgtaagaaatggatggtattcaccggggaaacaaggtatttgaatttctactttattgaaccagatttaccattattttaaaaggaatgcttatacaaatcaatttgaaattctacccatcttgagggaggaccgttcctcagttaaggacttgtttatttaaatgggactgtaaatatgttttggtttctaagctatattagcaaaatttatttttcaaaaatgcccactgtgatgtgaatgtcaaaatatattcttaagtgttttataactaattgtaaactttttttcagaagtcttattttatacttgtgaaactgaacacaattttgggacaacgtttaaacattacttttcatacttgaaataaacatttattttttaaaaaactaaaaaaaaaaaaaaaaaa

SEQ ID NO: 62 - protein, 1747 aa, Homo sapiens
MNWNEKPKSATLPPLYPKSQPPFLHQSLINQITTTSQSSFSYPGSNQEACMYPGNSNPISQPLLNIQNYPQQISVSDMHNGTVVASHTSVERITYANVNGPKQLTHNLQMSSGVTQNVWLNSPMRNPVHSHIGATVSHQTDFGANVPNMPALQSQLITSDTYSMQMQMIPSNSTRLPVAYQGNQGLNQSFSEQQVDWTQQCISKGLTYPDYRPPPKLYRYSPQSFLPDSTIQKQNFIPHTSLQVKNSQLPNSVLTLPSRQTSAVPSQQYATQTDKRPPPPPYNCRYGSQPLQSTQHITKHLSMEVPQSREMLSSEIRTSFQQQWQNPNENVSTIGNFTNLKVNTNSKQPFNSPIRSSVDGVQTLAQTNEEKIMDSCNPTSNQVLDTSVAKEKLVRDIKTLVEIKQKFSELARKIKINKDLLMAAGCIKMTNTSYSEPAQNSKLSLKQTAKIQSGPQITPVMPENAERQTPTVVESAETNKTQCMLNSDIQEVNCRRFNQVDSVLPNPVYSEKRPMPDPSHDVKVLTSKTSAVEMTQAVLNTQLSSENVTKVEQNSPAVCETISVPKSMSTEEYKSKIQNENMLLLALLSQARKTQKTVLKDANQTIQDSKPDSCEMNPNTQMTGNQLNLKNMETPSTSNVSGRVLDNSFCSGQESSTKGMPAKSDSSCSMEVLATCLSLWKKQPSDTAKEKECDKLRTNTTAVGISKPANIHVKSPCSVVGNSNSQNKISNPSQQTALSMVMHNYESSGINITKGTELQIAVVSPLVLSEVKTLSVKGITPAVLPETVYPVIKEGSVCSLQNQLAENAKATAALKVDVSGPVASTATSTKIFPLTQKEKQNESTNGNSEVTPNVNQGKHNKLESAIHSPMNDQQISQESRNSTVVSSDTLQIDNICSLVEGDTSYNSQIAKIFSSLPLKMVEPQKPSLPNQQGIGSREPEKQLDNTTENKDFGFQKDKPVQCTDVSHKICDQSKSEPPLESSFNNLETNRVILEKSSLEHATEKSTANDTCSSAAIQEDIYPQEIDASSNYTPQDPARNEIHSDKAPVLYLHDQLSELLKEFPYGIEAVNTREGSVGQQTTYQTSEDQTADKTSSDSKDPADQIQITILSSEQMKEIFPEQDDQPYVVDKLAEPQKEEPITEVVSQCDLQAPAAGQSRDSVILDSEKDDIHCCALGWLSMVYEGVPQCQCNSIKNSSSEEEKQKEQCSPLDTNSCKQGERTSDRDVTVVQFKSLVNNPKTPPDGKSHFPELQDDSRKDTPKTKHKSLPRTEQELVAGQFSSKCDKLNPLQNHKRKKLRFHEVTFHSSNKMTASYEQASQETRQKKHVTQNSRPLKTKTAFLPNKDVYKKHSSLGQSLSPEKIKLKLKSVSFKQKRKLDQGNVLDMEVKKKKHDKQEQKGSVGATFKLGDSLSNPNERAIVKEKMVSNTKSVDTKASSSKFSRILTPKEYLQRQKHKEALSNKASKKICVKNVPCDSEHMRPSKLAVQVESCGKSNEKHSSGVQTSKESLNGLTSHGKNLKIHHSQESKTYNILRNVKEKVGGKQPDKIWIDKTKLDKLTNISNEAQFSQMPPQVKDQKKLYLNRVGFKCTERESISLTKLESSPRKLHKDKRQENKHKTFLPVKGNTEKSNMLEFKLCPDILLKNTNSVEERKDVKPHPRKEQAPLQVSGIKSTKEDWLKFVATKKRTQKDSQERDNVNSRLSKRSFSADGFEMLQNPVKDSKEMFQTYKQMYLEKRSRSLGSSPVK

SEQ ID NO: 63 - DNA, 3302 bp, Homo sapiens
  CDS (177)..(2585)
gctatataaggcggcgtgaggcaggcgaggggggcagcgcagccgagcggagcccaggagagcagagagcgagcctgagcgagagacggggaagcacggaggaggaagccgccggtgcgtcgggacgggagcgcaggtgctcgggcacccgagctggagctccgcagccgccggtcatgtaccgctccaccaagggcgcctccaaggcgcgccgggaccagatcaacgccgagatccggaacctcaaggagctgctgccgctggccgaagcggacaaggtccggctgtcctacctgcacatcatgagcctcgcctgcatctacactcgcaagggcgtcttcttcgctggtggcactcctctggcgggccccacggggcttctctcagctcaagagcttgaggacatcgtagcggcactacccggctttctgcttgtgttcacagccgaggggaaattgctctacctgtctgagagtgtgagcgagcatctgggccactccatggtggacctggttgcccagggtgacagcatctacgacatcattgacccagctgaccacctcactgtgcgccagcaactcaccctgccctctgccctggacactgatcgcctcttccgctgccgcttcaacacctccaagtccctcaggcgccagagtgcaggcaacaaactcgtgcttattcgaggccgattccatgctcacccacctggagcctactgggcaggaaatcccgtgttcacagctttctgtgcccctctggagccgagaccccgcccaggtcctggccctggccctggccctgcctcgctcttcctggccatgttccagagccgccatgctaaagacctggctctactggacatctccgagagtgtcctaatctacctgggctttgagcgcagtgaactgctttgtaaatcatggtatggactgctgcaccccgaggacctggcccacgcttctgctcaacactaccgcctgttggctgagagtggagatattcaggcagagatggtggtgaggctacaggccaagactggaggctgggcatggatttactgcctgttatactcagaaggtccagagggacccattactgccaataactacccaatcagtgacatggaagcctggagcctccgccagcagttgaactctgaagacacccaggcagcttatgtcctgggcactccgaccatgctgccctcattccctgaaaacattctttcccaggaagagtgctccagcactaacccactcttcaccgcagcactgggggctcccagaagcaccagcttccccagtgctcctgaactgagtgttgtctctgcatcagaagagcttccccgaccctccaaagaactggacttcagttacctgacattcccttctgggcctgagccttctctccaagcagaactaagcaaggatcttgtgtgcactccaccttacacgccccatcagccaggaggctgtgccttcctcttcagcctccatgagcccttccagacccatttgcccaccccatccagcactcttcaagaacagctgactccaagcactgcgaccttctctgatcagttgacgcccagcagtgcaaccttcccagatccactaactagcccactgcaaggccagttgactgaaacctcggtcagaagctatgaagaccagttgactccctgcacctccaccttcccagaccagctgcttcccagcacagccaccttcccagagcctctgggcagccctgcccatgaacagctgactcctcccagcacagcattccaagcacacctggacagccccagccaaaccttcccagagcaactgagccccaaccctaccaagacttactttgcccaggagggatgcagttttctctatgagaagttgcccccaagtcctagcagccctggtaatggggactgcacgctcttggccctagcccagctccggggccccctctctgtggatgtccccctggtgcccgaaggcctgctcacacctgaggcctctccagtcaagcagagtttcttccactactctgaaaaggagcagaatgagatagaccgtctcatccagcagattagccaattggctcagggcatggacagacccttctcagctgaggctggcactggcggactagagccacttggaggactggagcccctggactccaacctgtccctgtcaggggcaggcccccctgtgctcagcctggacctgaaaccctggaaatgccaggagctggacttcctggctgaccctgataacatgttcctggaagagacgcccgtggaagacatcttcatggatctctctaccccagatcccagtgaggaatggggctcaggggatcctgaggcagagggcccaggaggggccccatcgccttgcaacaacctgtccccagaagaccacagcttcctggaggacctggccacatatgaaaccgcctttgagacaggtgtctcagcattcccctatgatgggtttactgatgagttgcatcaactccagagccaagttcaagacagcttccatgaagatggaagtggaggggaaccaacgttttgaataagtctgtgacttaacgtcgtcaagtatggcatattgtcatcaagacgtggagccgctctccacccccccgggactgttggggggattctgagggccagagggggatatatatgattccccaggccctgcaggattttggggggggggaggtgggagggcaagggaggggagcttctttttaaaatcaagagacttcgagcgatcccagtttccatttcaatctgtattcactcgtagtgagtttccttgaatgggatttcaagcggagaatgggggagtctcacttccccgccgccttgccccattggcctgggccagttctccactcctaggggccaagccacccctagccttggtgggggaaaggcagggcccacccgggccagcccgtgccctgaggggctcttgacacccacgtagaattctctacacaccagtaacgggatttcaattccgatggactctgccgccctggcggcccttcctgtgacttttgcgccccgcgcctggggtggggggtgcgaagagacgctacgttcctttccgatggaggaaggcagacctgccgtcacacgtgtgcttgcacgagtgcgtgtacctggtgcgggactcacccggccgccagactgcctgggcctgcccagatggccacctcgtggtgctgcggtgactttgtagccaactttataataaagtccagtttgcctttttggt

SEQ ID NO: 64 - protein, 802 aa, Homo sapiens
MYRSTKGASKARRDQINAEIRNLKELLPLAEADKVRLSYLHIMSLACIYTRKGVFFAGGTPLAGPTGLLSAQELEDIVAALPGFLLVFTAEGKLLYLSESVSEHLGHSMVDLVAQGDSIYDIIDPADHLTVRQQLTLPSALDTDRLFRCRFNTSKSLRRQSAGNKLVLIRGRFHAHPPGAYWAGNPVFTAFCAPLEPRPRPGPGPGPGPASLFLAMFQSRHAKDLALLDISESVLIYLGFERSELLCKSWYGLLHPEDLAHASAQHYRLLAESGDIQAEMVVRLQAKTGGWAWIYCLLYSEGPEGPITANNYPISDMEAWSLRQQLNSEDTQAAYVLGTPTMLPSFPENILSQEECSSTNPLFTAALGAPRSTSFPSAPELSVVSASEELPRPSKELDFSYLTFPSGPEPSLQAELSKDLVCTPPYTPHQPGGCAFLFSLHEPFQTHLPTPSSTLQEQLTPSTATFSDQLTPSSATFPDPLTSPLQGQLTETSVRSYEDQLTPCTSTFPDQLLPSTATFPEPLGSPAHEQLTPPSTAFQAHLDSPSQTFPEQLSPNPTKTYFAQEGCSFLYEKLPPSPSSPGNGDCTLLALAQLRGPLSVDVPLVPEGLLTPEASPVKQSFFHYSEKEQNEIDRLIQQISQLAQGMDRPFSAEAGTGGLEPLGGLEPLDSNLSLSGAGPPVLSLDLKPWKCQELDFLADPDNMFLEETPVEDIFMDLSTPDPSEEWGSGDPEAEGPGGAPSPCNNLSPEDHSFLEDLATYETAFETGVSAFPYDGFTDELHQLQSQVQDSFHEDGSGGEPTF

SEQ ID NO: 65 - DNA, 466 bp, Homo sapiens
  CDS (91)..(276)
cttgccgcgctgcactccaccacgcctcctccaagtcccagcgaacccgcgtgcaacctgtcccgactctagccgcctcttcagctcgccatggatcccaactgctcctgcgccgccggtgactcctgcacctgcgccggctcctgcaaatgcaaagagtgcaaatgcacctcctgcaagaaaagctgctgctcctgctgccctgtgggctgtgccaagtgtgcccagggctgcatctgcaaaggggcgtcggacaagtgcagctgctgcgcctgatgctgggacagccccgctcccagatgtaaagaacgcgacttccacaaacctggattttttatgtacaaccctgaccgtgaccgtttgctatattcctttttctatgaaataatgtgaatgataataaaacagctttgacttgaaaaaaaaaaaaaaaaaaaaaaaaaaaaaaaaaaaaaaaaaaaaaaaa

SEQ ID NO: 66 - protein, 61 aa, Homo sapiens
MDPNCSCAAGDSCTCAGSCKCKECKCTSCKKSCCSCCPVGCAKCAQGCICKGASDKCSCCA

SEQ ID NO: 67 - DNA, 2038 bp, Homo sapiens
  CDS (4)..(1971)
gccatggggcgctgggcctgggtccccagcccctggcccccaccggggctgggccccttcctcctcctcctcctgctgctgctgctgctgccacgggggttccagccccagcctggcgggaaccgtacggagtccccagaacctaatgccacagcgacccctgcgatccccactatcctggtgacctctgtgacctctgagaccccagcaacaagtgctccagaggcagagggaccccaaagtggggggctcccgcccccgcccagggcagttccctcgagcagtagcccccaggcccaagcactcaccgaggacgggaggccctgcaggttccccttccgctacgggggccgcatgctgcatgcctgcacttcggagggcagtgcacacaggaagtggtgtgccacaactcacaactacgaccgggacagggcctggggctactgtgtggaggccaccccgcctccagggggcccagctgccctggatccctgtgcctccggcccctgcctcaatggaggctcctgctccaatacccaggacccccagtcctatcactgcagctgcccccgggccttcaccggcaaggactgcggcacagagaaatgctttgatgagacccgctacgagtacctggaggggggcgaccgctgggcccgcgtgcgccagggccacgtggaacagtgcgagtgcttcgggggccggacctggtgcgaaggcacccgacatacagcttgtctgagcagcccttgcctgaacgggggcacctgccacctgatcgtggccaccgggaccaccgtgtgtgcctgcccaccaggcttcgctggacggctctgcaacatcgagcctgatgagcgctgcttcttggggaacggcactgggtaccgtggcgtggccagcacctcagcctcgggcctcagctgcctggcctggaactccgatctgctctaccaggagctgcacgtggactccgtgggcgccgcggccctgctgggcctgggcccccatgcctactgccggaatccggacaatgacgagaggccctggtgctacgtggtgaaggacagcgcgctctcctgggagtactgccgcctggaggcctgcgaatccctcaccagagtccaactgtcaccggatctcctggcgaccctgcctgagccagcctccccggggcgccaggcctgcggcaggaggcacaagaagaggacgttcctgcggccacgtatcatcggcggctcctcctcgctgcccggctcgcacccctggctggccgccatctacatcggggacagcttctgcgccgggagcctggtccacacctgctgggtggtgtcggccgcccactgcttctcccacagcccccccagggacagcgtctccgtggtgctgggccagcacttcttcaaccgcacgacggacgtgacgcagaccttcggcatcgagaagtacatcccgtacaccctgtactcggtgttcaaccccagcgaccacgacctcgtcctgatccggctgaagaagaaaggggaccgctgtgccacacgctcgcagttcgtgcagcccatctgcctgcccgagcccggcagcaccttccccgcaggacacaagtgccagattgcgggctggggccacttggatgagaacgtgagcggctactccagctccctgcgggaggccctggtccccctggtcgccgaccacaagtgcagcagccctgaggtctacggcgccgacatcagccccaacatgctctgtgccggctacttcgactgcaagtccgacgcctgccagggggactcaggggggcccctggcctgcgagaagaacggcgtggcttacctctacggcatcatcagctggggtgacggctgcgggcggctccacaagccgggggtctacacccgcgtggccaactatgtggactggatcaacgaccggatacggcctcccaggcggcttgtggctccctcctgaccctccagcgggacaccctggttcccaccattccctgccttgctgacaataaagatatttccaagaa

SEQ ID NO: 68 - protein, 655 aa, Homo sapiens
MGRWAWVPSPWPPPGLGPFLLLLLLLLLLPRGFQPQPGGNRTESPEPNATATPAIPTILVTSVTSETPATSAPEAEGPQSGGLPPPPRAVPSSSSPQAQALTEDGRPCRFPFRYGGRMLHACTSEGSAHRKWCATTHNYDRDRAWGYCVEATPPPGGPAALDPCASGPCLNGGSCSNTQDPQSYHCSCPRAFTGKDCGTEKCFDETRYEYLEGGDRWARVRQGHVEQCECFGGRTWCEGTRHTACLSSPCLNGGTCHLIVATGTTVCACPPGFAGRLCNIEPDERCFLGNGTGYRGVASTSASGLSCLAWNSDLLYQELHVDSVGAAALLGLGPHAYCRNPDNDERPWCYVVKDSALSWEYCRLEACESLTRVQLSPDLLATLPEPASPGRQACGRRHKKRTFLRPRIIGGSSSLPGSHPWLAAIYIGDSFCAGSLVHTCWVVSAAHCFSHSPPRDSVSVVLGQHFFNRTTDVTQTFGIEKYIPYTLYSVFNPSDHDLVLIRLKKKGDRCATRSQFVQPICLPEPGSTFPAGHKCQIAGWGHLDENVSGYSSSLREALVPLVADHKCSSPEVYGADISPNMLCAGYFDCKSDACQGDSGGPLACEKNGVAYLYGIISWGDGCGRLHKPGVYTRVANYVDWINDRIRPPRRLVAPS

SEQ ID NO: 69 - DNA, 1408 bp, Homo sapiens
  CDS (204)..(1277)
ataaaacagacatctcttgttttccagatactacgggtcataatccctaactccaatcactggcaactcctgagatcagaggaaaaccagcaacagcgtgggagtttggggagaggcattccataccagattctgtggcctgcaggtgacatgctgcctaagagaagcaggagtctgtgacagccaccccaacacgtgacgtcatggccagtagggaagatgagctgaggaactgtgtggtatgtggggaccaagccacaggctaccactttaatgcgctgacttgtgagggctgcaagggtttcttcaggagaacagtcagcaaaagcattggtcccacctgcccctttgctggaagctgtgaagtcagcaagactcagaggcgccactgcccagcctgcaggttgcagaagtgcttagatgctggcatgaggaaagacatgatactgtcggcagaagccctggcattgcggcgagcaaagcaggcccagcggcgggcacagcaaacacctgtgcaactgagtaaggagcaagaagagctgatccggacactcctgggggcccacacccgccacatgggcaccatgtttgaacagtttgtgcagtttaggcctccagctcatctgttcatccatcaccagcccttgcccaccctggcccctgtgctgcctctggtcacacacttcgcagacatcaacactttcatggtactgcaagtcatcaagtttactaaggacctgcccgtcttccgttccctgcccattgaagaccagatctcccttctcaagggagcagctgtggaaatctgtcacatcgtactcaataccactttctgtctccaaacacaaaacttcctctgcgggcctcttcgctacacaattgaagatggagcccgtgtatctcccacagtggggttccaggtagagtttttggagttgctctttcacttccatggaacactacgaaaactgcagctccaagagcctgagtatgtgctcttggctgccatggccctcttctctcctgctccctatcttacagaccgacctggagttacccagagagatgagattgatcagctgcaagaggagatggcactgactctgcaaagctacatcaagggccagcagcgaaggccccgggatcggtttctgtatgcgaagttgctaggcctgctggctgagctccggagcattaatgaggcctacgggtaccaaatccagcacatccagggcctgtctgccatgatgccgctgctccaggagatctgcagctgaggccatgctcacttccttccccagctcacctggaacaccctggatacactggagtgggaaaatgctgggaccaaagattgggccgggttcaaagggagcccagtggttgcaatgaaagactaaagcaataa

SEQ ID NO: 70 - protein, 357 aa, Homo sapiens
MASREDELRNCVVCGDQATGYHFNALTCEGCKGFFRRTVSKSIGPTCPFAGSCEVSKTQRRHCPACRLQKCLDAGMRKDMILSAEALALRRAKQAQRRAQQTPVQLSKEQEELIRTLLGAHTRHMGTMFEQFVQFRPPAHLFIHHQPLPTLAPVLPLVTHFADINTFMVLQVIKFTKDLPVFRSLPIEDQISLLKGAAVEICHIVLNTTFCLQTQNFLCGPLRYTIEDGARVSPTVGFQVEFLELLFHFHGTLRKLQLQEPEYVLLAAMALFSPAPYLTDRPGVTQRDEIDQLQEEMALTLQSYIKGQQRRPRDRFLYAKLLGLLAELRSINEAYGYQIQHIQGLSAMMPLLQEICS

SEQ ID NO: 71 - DNA, 454 bp, Homo sapiens
  CDS (57)..(329)
ggagtccaaatcactcattgtttgtgaaagctgagctcacagcaaaacaagccaccatgaagctgtcggtgtgtctcctgctggtcacgctggccctctgctgctaccaggccaatgccgagttctgcccagctcttgtttctgagctgttagacttcttcttcattagtgaacctctgttcaagttaagtcttgccaaatttgatgcccctccggaagctgttgcagccaagttaggagtgaagagatgcacggatcagatgtcccttcagaaacgaagcctcattgcggaagtcctggtgaaaatattgaagaaatgtagtgtgtgacatgtaaaaactttcatcctggtttccactgtctttcaatgacaccctgatcttcactgcagaatgtaaaggtttcaacgtcttgctttaataaatcacttgctctccaaaaaaaaaaaaaaaaa

SEQ ID NO: 72 - protein, 90 aa, Homo sapiens
MKLSVCLLLVTLALCCYQANAEFCPALVSELLDFFFISEPLFKLSLAKFDAPPEAVAAKLGVKRCTDQMSLQKRSLIAEVLVKILKKCSV

SEQ ID NO: 73 - DNA, 1394 bp, Homo sapiens
  CDS (495)..(1196)
ttaaggaggtgcagtcttatgggagggacaggggcggagtcagtctttaaaagctgttcccaggtctggcccgcctgccacaaacgctgagcccaggtgggagaggtctggcctatccgcgcctggcagctgtcggaactccggagaccacaaaggggtttatggtttaccccctccacggaaggtcggtctgatcgcagctgcgggtcggggagagggaccgggggtcccccagtcagtaggcctcagaacacctcttcagtgccggggcaccagacagcggattttgcattcgactctccccaaagtgtgccgaacaggttggaagcaaaggctccggtttaagctctgggcttggggataaaatacactttttaaggacccaagttcctcggcaacgactccagactgggaagacctttccattttcaggatcgacgcttcacgttgaggggagggcattcaggacgccctcttaaggcttctcccaacccatggcgctaccaggctcctcacaggaccaggcctggagcctggagcctccggctgccacggctgctgcctcctcatcttcgggaccccaggagcgggagggcgctgggagccccgcggcccccgggacgctgcccctggagaaggtgaagcggccgatgaacgcgttcatggtgtggagctccgctcagcgccgccagatggcgcagcagaaccccaagatgcacaactccgagatctccaagcgcctgggcgcgcagtggaagctgctggacgaggacgagaagcggcccttcgtggaggaggccaagcggctccgcgcccgacacctgcgcgactaccccgactacaagtaccggcctcggcgcaaggccaagagctcgggcgccggaccttcccgctgcggacagggaagaggcaacctggccagcggcggcccgctctgggggccggggtacgcgaccacccaaccgagcagaggctttgggtacagaccccccagctactcgacagcctacctgcctggcagctatggctcttcccactgcaaactggaagccccctcaccgtgctccctccctcagagtgaccctaggctccagggggaactgctgcccacctatacccactacctgccccctggctctcccactccatacaaccctccccttgctggtgcccccatgcccctaacccacctctaaccctcatggacgcagacctcacgggacgggcctcatcctccttttttaatccagcagcatcccctaccccaggctgtcaaccctttctcctgttggactacagttcagaggcagcctgcagtcctcccatgatagccagggagagccgcacaacatacaattatatttttggtagtattaaacagttttgtattattc

SEQ ID NO: 74 - protein, 233 aa, Homo sapiens [sequence omitted]

SEQ ID NO: 75 - DNA, 1309 bp, Homo sapiens
  CDS (135)..(1172)
agaaaagcaagggcagggttcagaaagactgaatgtaaagctgggctctgagtctgccaggcccttcgtgtgttgctctgcacattaattaaagggtctacgaggtcagcaaggacgcccaagaagactcagtcatgaaaggtgaactgctcctgttttccagtgtgattgtcctgctccaggtggtatgcagctgcccggacaagtgttactgtcagtcatctacaaattttgtagactgcagccagcagggtctggccgaaatcccttcccatttacctcctcagactcgaacgctgcatttacaagataatcagatacaccatcttcctgcttttgcatttaggtcagtgccatggctcatgaccttaaacttgtccaacaattccctttcaaatctggcccctggagctttccatgggcttcagcacttgcaggttttaaatctaacccagaattcactcctttccctggaaagcagacttttccattccctccctcagctgagggagcttgatttgtcatcaaacaacataagccaccttcccacatccttgggagagacttgggagaacctaactatacttgcggttcaacaaaaccagcttcagcagcttgatcgagcgctcctggaatccatgcccagtgtgaggcttttacttctcaaggacaacctctggaaatgcaattgccacttgctcggtcttaaactctggctggagaaatttgtctataaagggggactaacagacggcatcatctgtgaatcaccagacacctggaagggaaaggacctccttaggatccctcatgagctgtaccagccctgccctcttcctgctcctgatccagtgtcctcgcaggctcagtggcccggctctgcccacggtgtggtcctgaggcctcctgagaaccacaacgcgggggagcgagaactcttggagtgcgagctcaaacccaagccaaggccggccaacctgcgtcatgccattgccactgtcatcatcactggcgttgtgtgtgggattgtgtgtctcatgatgttggcagctgccatctatggctgcacctatgcggcaatcacagcccagtaccatgggggacccttggctcaaaccaatgatcctgggaaggtggaagaaaaagagcgatttgacagctcaccagcctgagagcttttgtctcaaataggattggtcattgcaggccagaagatagtgtctgagtagggctgatgtgtttcctgttagtctgattttgcttttgccaaaagacaaaaaaaaaaaaaaaaaaaaaaaaaaaaaaaaaa

SEQ ID NO: 76 - protein, 345 aa, Homo sapiens
MKGELLLFSSVIVLLQVVCSCPDKCYCQSSTNFVDCSQQGLAEIPSHLPPQTRTLHLQDNQIHHLPAFAFRSVPWLMTLNLSNNSLSNLAPGAFHGLQHLQVLNLTQNSLLSLESRLFHSLPQLRELDLSSNNISHLPTSLGETWENLTILAVQQNQLQQLDRALLESMPSVRLLLLKDNLWKCNCHLLGLKLWLEKFVYKGGLTDGIICESPDTWKGKDLLRIPHELYQPCPLPAPDPVSSQAQWPGSAHGVVLRPPENHNAGERELLECELKPKPRPANLRHAIATVIITGVVCGIVCLMMLAAAIYGCTYAAITAQYHGGPLAQTNDPGKVEEKERFDSSPA

SEQ ID NO: 77 - DNA, 3209 bp, Homo sapiens
  CDS (181)..(1164)
gtcagctgccagagggcggggccgcaggagggcggggcgcgagcgagagctgggagaaggcagtgagcgagcaggcggcaggcacggtccgtgcggagcaggcgagcgagcgggaagacgcagccaccttcctcaccagccagcccacagcggtttgttccccttctcgggagtgcgccaatgcctgggccgacccaaaccctgtccccaaatggcgagaacaacaacgacatcatccaggataataacgggaccatcattcctttccggaagcacacagtgcgcggggagcgttcctacagttggggaatggcggtcaatgtgtattctacctcgataacccaagagactatgagcagacatgacatcattgcatgggttaatgacatagtatctttaaactacacaaaagtggaacagctttgttcaggagcggcctattgccaattcatggacatgctcttccctggctgcattagtttgaagaaagtaaaatttcaagcaaagctggaacatgaatatattcacaattttaaacttctgcaagcatcatttaagcgaatgaacgttgataaggtaattccagtggagaagctagtgaaaggacgtttccaggacaacctggattttattcaatggtttaagaaattctatgatgctaactacgatgggaaggagtatgatcctgtagaggcacgacaagggcaagatgcaattcctcctcctgaccctggtgaacagatcttcaacctgccaaaaaagtctcaccatgcaaactcccccacagcaggtgcagctaaatcaagtccagcagctaaaccaggatccacaccttctcgaccctcatcagccaaaagggcttcttccagtggctcagcatccaaatccgataaagatttagaaacgcaggtcatacagcttaatgaacaggtacattcattaaaacttgcccttgaaggcgtggaaaaggaaagggatttctactttgggaagttgagagagatcgagctactctgccaagaacacgggcaggaaaatgatgacctcgtgcagagactaatggacatcctgtatgcttcagaagaacacgagggccacacagaagagccggaagcagaggagcaagcccacgaacagcagcccccgcagcaggaagagtactgacccaccccggctgctcttgacacttccattgtgtgtgggaacgtttcttctggagaattggaacatgtgtggccccaagctcaacagaaaccagttgttcccaatctgccgttaccatcaacgcactgttgcatatgccagccactgcgcttggttcccattttctttgccaaggtgtattagcggacggccctctggccacctacccgagagatcgtagggtcacatacatccaacttcaccacttggctgcttgagattggttctgctcttttcttcatttctttccagaacaactctttcccaccccaacaccactgccaccacccctctttttatcctggtgtgaaacaatggtaatttgatatatggtatttatattggcatttttcaacccagtgtcactagatgtcacacacatttgtggtgctttgatgtttgcaagtctaacctctgaacataaatttggtcaaataattggaacaaagggaaacagatacttgatatgaaagccataatgacggtgacttgtgtcgtgggggaaaacataaggtcattttctccctctactcacaatactaaagggaaaaaatggattcaaagctaggatttcagggcccagcagtgttcctccatcagcatgttagacaactacacagtatgttgttagttttgaaagacattcactcaaggaaaacaccatctcaactttgcccgctcaccatgtcccttgcccccatgtagcccatttcccaggttatgctcttttctttctcagggtcctctttggtgggcagccactccccgagatgttgccatcagttttctgcagtccaaagagggtatggttaggtacgggtcttcctgcctcattcctcttcctctttgtgtaggtttcagccacaaaactgtcattcactctaggggacccctactaaagggtaacttcaggtgtgcagccctgagctccaaggctctgcaccatgccacacacttgctgtaaggctagaagtgaagaccttattaataggagcataattgcgagggagaatcatggttctgcagtctggtgtagacactggaataacagcacagaaaaatctatgactcccaatatcttctagaataaagaattttccctctttaacacaagggccctccttgtcattgaccttagctaaaccatggcaattcataaatagaggaaacattaatgaattaaaagcattccttattttttaactaatatttgtacattttcttagtctctttccaagtctttgcctcttttttttctttatttttattttttcctttgacagatggtatcccttcctggatcattcatttcaccttggtttctaactttaggtttactttcacttgttatttgacttagcaggtgcaacaaaaacaagaaacaaatgtgcccaccccactttccgcttaactgaaaagcttaaaataaatttctgaattatgtatcctgaagctttgaaatttctttattaatcgatgaaatatgaattctaaattctagcattgaagcttttcaccaaaagaagtctctccaaaataaatcttttgcagcaaagtgatatttattgagttatgtggaaaagatggcttgtatttttcagattattacaacacactgtgcagaattagacagatgttccgtggtgtttggtttccctttcttctctctcctgctcactctgcattatagcagcagcttatttctctaaggctggacagcctggctctcggcagtgacgtcctcccacacctggtcacaagtagtagtggctgtgctatacccagcatcatgcttaacagcgtgttgcccttctgagcctgttgtactcactgatctctttaaaaacaaaaaatagctcttgtaaaaggtcacaataactctatgcacctgatactgcagtggttcctaggccattcttcatctgctctggacatctcagtcatacccaatgctcagtggatcatgaccaaactcctgtcatgtggatgcacgtgagtgggtagca

SEQ ID NO: 78 - protein, 327 aa, Homo sapiens
MPGPTQTLSPNGENNNDIIQDNNGTIIPFRKHTVRGERSYSWGMAVNVYSTSITQETMSRHDIIAWVNDIVSLNYTKVEQLCSGAAYCQFMDMLFPGCISLKKVKFQAKLEHEYIHNFKLLQASFKRMNVDKVIPVEKLVKGRFQDNLDFIQWFKKFYDANYDGKEYDPVEARQGQDAIPPPDPGEQIFNLPKKSHHANSPTAGAAKSSPAAKPGSTPSRPSSAKRASSSGSASKSDKDLETQVIQLNEQVHSLKLALEGVEKERDFYFGKLREIELLCQEHGQENDDLVQRLMDILYASEEHEGHTEEPEAEEQAHEQQPPQQEEY

SEQ ID NO: 79 - DNA, 1221 bp, Homo sapiens
  CDS (149)..(625)
gggtcctcggagctgctctggctgcgcgcggagcgggctccggagggaagtcccgagacaaagggaagcgccgccgccgccgccccgctcggtcctccacctgtccgctacgctcgccggggctgcggccgcccgagggactttgaacatgtcggggatcgccctcagcagactcgcccaggagaggaaagcatggaggaaagaccacccatttggtttcgtggctgtcccaacaaaaaatcccgatggcacgatgaacctcatgaactgggagtgcgccattccaggaaagaaagggactccgtgggaaggaggcttgtttaaactacggatgcttttcaaagatgattatccatcttcgccaccaaaatgtaaattcgaaccaccattatttcacccgaatgtgtacccttcggggacagtgtgcctgtccatcttagaggaggacaaggactggaggccagccatcacaatcaaacagatcctattaggaatacaggaacttctaaatgaaccaaatatccaagacccagctcaagcagaggcctacacgatttactgccaaaacagagtggagtacgagaaaagggtccgagcacaagccaagaagtttgcgccctcataagcagcgaccttgtggcatcgtcaaaaggaagggattggtttggcaagaacttgtttacaacatttttgcaaatctaaagttgctccatacaatgactagtcacctgggggggttgggcgggcgccatcttccattgccgccgcgggtgtgcggtctcgattcgctgaattgcccgtttccatacagggtctcttccttcggtcttttgtatttttgattgttatgtaaaactcgcttttattttaatattgatgtcagtatttcaactgctgtaaaattataaacttttatacttgggtaagtcccccaggggcgagttcctcgctctgggatgcaggcatgcttctcaccgtgcagagctgcacttggcctcagctggctgtatggaaatgcaccctccctcctgccgctcctctctagaaccttctagaacctgggctgtgctgcttttgagcctcagaccccaggtcagcatctcggttctgcgccacttcctttgtgtttatatggcgttttgtctgtgttgctgtttagagtaaataaactgtttatataaaggttttggttgcattattatcattgaaagtgagaggagg

SEQ ID NO: 80 - protein, 158 aa, Homo sapiens [sequence omitted]

SEQ ID NO: 81 - DNA, 4661 bp, Homo sapiens
  CDS (159)..(3971)
tttttgaatctgcggaggcggcggcggtggcagcggcggcgcggcgactgaagcgcgcgaaaagctgaggcggcaacgtcggggacggctgcgcgggacggctctgtaggaaggaacttggttccccctccctcagcttccgccccaaaagattcagaatggacagtttagaagaacctcagaaaaaagtctttaaggctcgaaaaacgatgagagtgagtgatcgtcagcaacttgaagcagtgtacaaggtcaaagaagaactgttgaaaactgatgtcaagctgttaaatggcaaccatgaaaatggagatttggacccaacctcacctttggaaaacatggattacattaaagacaaggaagaggtgaatggcattgaagagatttgttttgatcctgaaggaagtaaagcagaatggaaggaaacaccctgtatcctaagtgttaatgtaaaaaacaagcaggatgatgatttaaattgtgaacctttgtctccccataatataactccagaaccagtctctaaactgcctgctgaaccagtttctggtgatccagcccctggtgatctggatgccggagatccagcctccggagtactggcctctggtgattccacctctggtgatcccacctctagcgagccctcctctagtgatgctgcctctggtgatgcaacctctggtgatgccccttctggtgatgtgtcccctggtgatgccacctctggtgatgccactgctgatgatctctcctctggtgatcccacctctagtgatcccatcccaggtgaaccggtccctgttgaacccatttctggtgattgtgccgctgatgatatagcctctagtgaaataacttctgttgatctggcttctggagcaccagcttccactgatccagcctctgatgatctggcctctggtgatctatcctctagtgaactggcctctgatgatctggccactggtgaactggcctctgatgagctgacttctgaatcaacctttgatcgtacctttgaaccaaagtctgtaccagtttgtgaaccagttcctgaaattgacaatatagaaccaagtagcaataaagatgatgattttcttgaaaaaaatggagctgatgaaaaattagagcaaattcagagtaaagactcattggatgagaaaaataaagctgataataatattgatgctaatgaagaaactctagaaacagatgatacaactatttgttcagatcgacctcctgaaaatgaaaagaaggtagaggaagatattatcacagagcttgctcttggagaagatgctatatctagcagtatggaaattgaccaaggtgaaaagaatgaagatgaaacttctgcagatcttgtagaaacgattaatgaaaatgttattgaagataacaaaagtgagaatatcttagaaaatacagactctatggagacagatgaaatcattcctattttggaaaagcttgcaccttctgaggatgaacttacttgcttttctaaaacatctctccttccaatcgatgagacaaatccagatttggaagagaaaatggaaagttcttttggttcaccatctaaacaagaaagtagtgagagtttgccaaaagaagcctttctggtcctctctgatgaagaggatatttcgggtgaaaaagatgagtctgaagttatatcgcaaaatgaaacgtgctctccagcagaagtagaaagtaatgaaaaggacaacaaacctgaggaagaagagcaagtaatacatgaagatgatgaaagaccttctgagaaaaatgaattttctagacgaaaacgttctaaatcagaagacatggacaatgtacagtctaaacgtcgtcgatatatggaagaagaatatgaggcagaatttcaagtaaagattacagccaaaggagacattaaccagaaacttcaaaaggttatacagtggttgctggaagaaaaattgtgtgcgctgcagtgtgctgtatttgataagactttggcagaattgaaaacacgagtggaaaagattgaatgtaacaagaggcataaaacagttctcactgaactacaggccaagatagccaggttaaccaaacgctttgaagcagccaaagaagatcttaagaaaagacatgaacatccacccaacccaccagtatcaccaggaaaaactgtaaatgatgtcaacagcaataataacatgtcttacagaaatgcaggcacagtgagacagatgctggagtccaaaagaaatgtaagcgagagtgcaccaccatcctttcaaactcctgtgaatacagtatcttcaaccaatcttgtcactcctccagcagttgtcagtagtcaacctaaattgcagactccagtgacttcgggttccctcacagcaacgtcagttcttcctgcacccaatacagctactgtagttgctactactcaggtgcctagtggaaatccccagcctacaatctctttacagcctttgccagtgattttgcatgtacctgttgcagtatcctcccagcctcagcttctacagagccatccagggactttggtgactaatcaaccatctggcaatgttgaattcatttctgtgcaaagcccacctacagtgagtggtcttaccaaaaatccagtatccttgccatccttgccaaatcccactaaaccaaacaacgttccttctgtgcccagtcctagtattcaaaggaaccctactgccagtgctgcaccattgggaacaacacttgctgtgcaggctgttccaacagcacactctattgtacaagccacaaggacttctttacccacagtgggcccatcaggactctatagtccatcaactaatcgaggtcctatacagatgaaaattccaatttctgcatttagtacttcgtctgctgcagaacagaacagcaataccaccccaagaattgaaaaccagacaaacaaaacaatagatgcttctgtcagtaagaaagcagctgatagcacatcacagtgtggaaaagccactggcagtgattcaagtggtgtcattgatctcacaatggatgatgaagagagtggagcttcacaagaccccaaaaaactaaatcacactcctgtatcaaccatgagttcttctcagcctgtgtcacgaccattgcaacccatacaaccagcaccgcctcttcaaccatctggggtgccaacaagtggaccatctcagaccaccatacacttactacctacagctccaactaccgtgaatgtaacacatcgtccagtaactcaggtgaccacaagactccctgtaccaagagctcctgcaaaccaccaggtggtttatacaactcttcctgcaccaccagctcaggctcccttgcgaggaactgttatgcaggctcctgctgttcggcaggtcaatccccaaaatagtgttacagttcgagtgcctcaaacaaccacatatgttgtaaacaatggactaaccctgggatcaacaggacctcagctcacagtgcatcaccgaccaccacaagtgcatactgagcccccacgccccgtgcacccagcacccttaccagaagctccacaaccacagcgtctgcccccagaagctgccagcacatctctgcctcagaagccacacttgaagttagcacgcgttcagagtcaaaatggcatagtactgtcatggagtgtcctggaggtggatcgaagctgtgccactgttgatagctaccatctctatgcttaccatgaggaacccagtgccactgtgccctcacaatggaaaaagattggggaagtcaaggcacttcccttgcccatggcatgtactctcacccagtttgtatctggtagcaaatactactttgcagtacgagccaaggatatttatggacgttttgggcctttctgtgatcctcagtcaacagatgtgatctcttctacccagagcagttaaaccttggagcctttatattttcctcttttaaaatttccaccttttggtcttgtttttaatcttgtgcatgataccccatgtaaaatccaccttgtgcaagatttcttggacagatgtgtgtatacactacatttgtttataaccagaagcaaaataaactcagcccacaaagctagaatcttttcctggacagtttaggctttggggtttggaaatgtaaatgtgtaccttgctttagttttgaggctggggaatatgtgtgggtgtttatgtgtgtttttccttatgtaggtgttattgcattggagtctcccattttcattctcaaatttacctcttaaagtacgaagtaagtagatcaaaggatttgagatgtgtaactggcatgattctgcttttgaaggatctatagtatcattttagttaagtgggtcaaacagaatcaaaacaaaacccaaagaaataaataaaaaacaaaatggctaaatagtttaaaataggttaattcgaacacaggaaaggatctatttgttgtttcttttgtctggtctcctgagttgttaattaggtgaaaaaagatctgcaatggccccctccctttcctaatctggcttttacatttattttgtgccttaaagattaactacaaagataaacatggccaaaaataaataaataaatatggccata

SEQ ID NO: 82 - protein, 1270 aa, Homo sapiens
MDSLEEPQKKVFKARKTMRVSDRQQLEAVYKVKEELLKTDVKLLNGNHENGDLDPTSPLENMDYIKDKEEVNGIEEICFDPEGSKAEWKETPCILSVNVKNKQDDDLNCEPLSPHNITPEPVSKLPAEPVSGDPAPGDLDAGDPASGVLASGDSTSGDPTSSEPSSSDAASGDATSGDAPSGDVSPGDATSGDATADDLSSGDPTSSDPIPGEPVPVEPISGDCAADDIASSEITSVDLASGAPASTDPASDDLASGDLSSSELASDDLATGELASDELTSESTFDRTFEPKSVPVCEPVPEIDNIEPSSNKDDDFLEKNGADEKLEQIQSKDSLDEKNKADNNIDANEETLETDDTTICSDRPPENEKKVEEDIITELALGEDAISSSMEIDQGEKNEDETSADLVETINENVIEDNKSENILENTDSMETDEIIPILEKLAPSEDELTCFSKTSLLPIDETNPDLEEKMESSFGSPSKQESSESLPKEAFLVLSDEEDISGEKDESEVISQNETCSPAEVESNEKDNKPEEEEQVIHEDDERPSEKNEFSRRKRSKSEDMDNVQSKRRRYMEEEYEAEFQVKITAKGDINQKLQKVIQWLLEEKLCALQCAVFDKTLAELKTRVEKIECNKRHKTVLTELQAKIARLTKRFEAAKEDLKKRHEHPPNPPVSPGKTVNDVNSNNNMSYRNAGTVRQMLESKRNVSESAPPSFQTPVNTVSSTNLVTPPAVVSSQPKLQTPVTSGSLTATSVLPAPNTATVVATTQVPSGNPQPTISLQPLPVILHVPVAVSSQPQLLQSHPGTLVTNQPSGNVEFISVQSPPTVSGLTKNPVSLPSLPNPTKPNNVPSVPSPSIQRNPTASAAPLGTTLAVQAVPTAHSIVQATRTSLPTVGPSGLYSPSTNRGPIQMKIPISAFSTSSAAEQNSNTTPRIENQTNKTIDASVSKKAADSTSQCGKATGSDSSGVIDLTMDDEESGASQDPKKLNHTPVSTMSSSQPVSRPLQPIQPAPPLQPSGVPTSGPSQTTIHLLPTAPTTVNVTHRPVTQVTTRLPVPRAPANHQVVYTTLPAPPAQAPLRGTVMQAPAVRQVNPQNSVTVRVPQTTTYVVNNGLTLGSTGPQLTVHHRPPQVHTEPPRPVHPAPLPEAPQPQRLPPEAASTSLPQKPHLKLARVQSQNGIVLSWSVLEVDRSCATVDSYHLYAYHEEPSATVPSQWKKIGEVKALPLPMACTLTQFVSGSKYYFAVRAKDIYGRFGPFCDPQSTDVISSTQSS

SEQ ID NO: 83 - DNA, 3215 bp, Homo sapiens
  CDS (178)..(2415)
gacaatatcaggtgagctgtggaggtggggtccttggaagctggatgacagcagctggcaaggggataagagagcagtgagcccctccctcaaggaggtctggctttatccatagacagggccctctgaggtggggctgaggtacaaagggggattgagcagcccaggagaagagagatgggggttcccttcttctcttctctcagatgcatggtggacttaggaccttgctgggctgggggtctcactgcagagatgaagctgcttctggccctagcagggctcctggccattctggccacgccccagccctctgaaggtgctgctccagctgtcctgggggaggtggacacctcgttggtgctgagctccatggaggaggccaagcagctggtggacaaggcctacaaggagcggcgggaaagcatcaagcagcggcttcgcagcggctcagccagccccatggaactcctatcctacttcaagcagccggtggcagccaccaggacggcggtgagggccgctgactacctgcacgtggctctagacctgctggagaggaagctgcggtccctgtggcgaaggccattcaatgtcactgatgtgctgacgcccgcccagctgaatgtgttgtccaagtcaagcggctgcgcctaccaggacgtgggggtgacttgcccggagcaggacaaataccgcaccatcaccgggatgtgcaacaacagacgcagccccacgctgggggcctccaaccgtgcctttgtgcgctggctgccggcggagtatgaggacggcttctctcttccctacggctggacgcccggggtcaagcgcaacggcttcccggtggctctggctcgcgcggtctccaacgagatcgtgcgcttccccactgatcagctgactccggaccaggagcgctcactcatgttcatgcaatggggccagctgttggaccacgacctcgacttcacccctgagccggccgcccgggcctccttcgtcactggcgtcaactgcgagaccagctgcgttcagcagccgccctgcttcccgctcaagatcccgcccaatgacccccgcatcaagaaccaagccgactgcatcccgttcttccgctcctgcccggcttgccccgggagcaacatcaccatccgcaaccagatcaacgcgctcacttccttcgtggacgccagcatggtgtacggcagcgaggagcccctggccaggaacctgcgcaacatgtccaaccagctggggctgctggccgtcaaccagcgcttccaagacaacggccgggccctgctgccctttgacaacctgcacgatgacccctgtctcctcaccaaccgctcagcgcgcatcccctgcttcctggcaggggacacccgttccagtgagatgcccgagctcacctccatgcacaccctcttacttcgggagcacaaccggctggccacagagctcaagagcctgaaccctaggtgggatggggagaggctctaccaggaagcccggaagatcgtgggggccatggtccagatcatcacttaccgggactacctgcccctggtgctggggccaacggccatgaggaagtacctgcccacgtaccgttcctacaatgactcagtggacccacgcatcgccaacgtcttcaccaatgccttccgctacggccacaccctcatccaacccttcatgttccgcctggacaatcggtaccagcccatggaacccaacccccgtgtccccctcagcagggtcttttttgcctcctggagggtcgtgctggaaggtggcattgaccccatcctccggggcctcatggccacccctgccaagctgaatcgtcagaaccaaattgcagtggatgagatccgggagcgattgtttgagcaggtcatgaggattgggctggacctgcctgctctgaacatgcagcgcagcagggaccacggcctcccaggatacaatgcctggaggcgcttctgtgggctcccgcagcctgaaactgtgggccagctgggcacggtgctgaggaacctgaaattggcgaggaaactgatggagcagtatggcacgcccaacaacatcgacatctggatgggcggcgtgtccgagcctctgaagcgcaaaggccgcgtgggcccactcctcgcctgcatcatcggtacccagttcaggaagctccgggatggtgatcggttttggtgggagaacgagggtgtgttcagcatgcagcagcgacaggccctggcccagatctcattgccccggatcatctgcgacaacacaggcatcaccaccgtgtctaagaacaacatcttcatgtccaactcatatccccgggactttgtcaactgcagtacacttcctgcattgaacctggcttcctggagggaagcctcctagaggccaggtaagggggtgcagcagtgaggggtatatctgggctggccagttggaaccacggagatctccttgccctagatgagcccagccctgttctgggtgcagctgagaaaatgagtgactagacgttcatttgtgtgctcatgtatgtgcgaagtatataaattggcttttcatgcgtgtgtgttgtctgaacatggggagtgtttcatgggttatgtgtatgtgccatttatgtgagtgtgtgtttgtgctgatgagaatactgagtatgtggaaggcagcagagcggactggtgaggagcacagctcaggaactagactgcctgggttccaatcctggctctgtggcttgctagctatgtgaccttgagcaaattaccctccttaaacaagagttttcttccttgtaaattacatctgtcatggtttcttggagggcccacttgtatcctctggttcttcatttattgagcacctactacatgcaaggcactgtactaggcgtgagaagcatatagaggcaagaaagagataccaagatgccatctgtgtcctggttagcagagctggaccagtggtgccttggagggataagccagctgcagctgggctgtgtggttgacttatgggcccagccagccaggctcaggccatggctcccctttttcttcctcaccctgatttcttgcttattcactgaagttctcctgaagaggaactgggcctgttgccctttctgtaccatttatttgctcccaatgtttatgataataaaggcaccgctgatggggacctcc

SEQ ID NO: 84 - protein, 745 aa, Homo sapiens
MGVPFFSSLRCMVDLGPCWAGGLTAEMKLLLALAGLLAILATPQPSEGAAPAVLGEVDTSLVLSSMEEAKQLVDKAYKERRESIKQRLRSGSASPMELLSYFKQPVAATRTAVRAADYLHVALDLLERKLRSLWRRPFNVTDVLTPAQLNVLSKSSGCAYQDVGVTCPEQDKYRTITGMCNNRRSPTLGASNRAFVRWLPAEYEDGFSLPYGWTPGVKRNGFPVALARAVSNEIVRFPTDQLTPDQERSLMFMQWGQLLDHDLDFTPEPAARASFVTGVNCETSCVQQPPCFPLKIPPNDPRIKNQADCIPFFRSCPACPGSNITIRNQINALTSFVDASMVYGSEEPLARNLRNMSNQLGLLAVNQRFQDNGRALLPFDNLHDDPCLLTNRSARIPCFLAGDTRSSEMPELTSMHTLLLREHNRLATELKSLNPRWDGERLYQEARKIVGAMVQIITYRDYLPLVLGPTAMRKYLPTYRSYNDSVDPRIANVFTNAFRYGHTLIQPFMFRLDNRYQPMEPNPRVPLSRVFFASWRVVLEGGIDPILRGLMATPAKLNRQNQIAVDEIRERLFEQVMRIGLDLPALNMQRSRDHGLPGYNAWRRFCGLPQPETVGQLGTVLRNLKLARKLMEQYGTPNNIDIWMGGVSEPLKRKGRVGPLLACIIGTQFRKLRDGDRFWWENEGVFSMQQRQALAQISLPRIICDNTGITTVSKNNIFMSNSYPRDFVNCSTLPALNLASWREAS

SEQ ID NO: 85 - DNA, 3376 bp, Homo sapiens
  CDS (136)..(3168)
agtgaggggcggtgccgcgctggtcccgcgccggtcccggtgggccgacttccggcgagcgggcaagcgggaaccaggtggccacccggtgtcggtttcattttcctttggaatttctgctttacagacagaacaatggcagcccgagtacttataattggcagtggaggaagggaacatacgctggcctggaaacttgcacagtctcatcatgtcaaacaagtgttggttgccccaggaaacgcaggcactgcctgctctgaaaagatttcaaataccgccatctcaatcagtgaccacactgcccttgctcaattctgcaaagagaagaaaattgaatttgtagttgttggaccagaagcacctctggctgctgggattgttgggaacctgaggtctgcaggagtgcaatgctttggcccaacagcagaagcggctcagttagagtccagcaaaaggtttgccaaagagtttatggacagacatggaatcccaaccgcacaatggaaggctttcaccaaacctgaagaagcctgcagcttcattttgagtgcagacttccctgctttggttgtgaaggccagtggtcttgcagctggaaaaggggtgattgttgcaaagagcaaagaagaggcctgcaaagctgtacaagagatcatgcaggagaaagcctttggggcagctggagaaacaattgtcattgaagaacttcttgacggagaagaggtgtcgtgtctgtgtttcactgatggcaagactgtggcccccatgcccccagcacaggaccataagcgattactggagggagatggtggccctaacacagggggaatgggagcctattgtccagcccctcaggtttctaatgatctattactaaaaattaaagatactgttcttcagaggacagtggatggcatgcagcaagagggtactccatatacaggtattctctatgctggaataatgctgaccaagaatggcccaaaagttctagagtttaattgccgttttggtgatccagagtgccaagtaatcctcccacttcttaaaagtgatctttatgaagtgattcagtccaccttagatggactgctctgcacatctctgcctgtttggctagaaaaccacaccgccctaactgttgtcatggcaagtaaaggttatcctggagactacaccaagggtgtagagataacagggtttcctgaggctcaagctctaggactggaggtgttccatgcaggcactgccctcaaaaatggcaaagtagtaactcatgggggtagagttcttgcagtcacagccatccgggaaaatctcatatcagcccttgaggaagccaagaaaggactagctgctataaagtttgagggagcaatttataggaaagacgtcggctttcgtgccatagctttcctccagcagcccaggagtttgacttacaaggaatctggagtagatatcgcagctggaaatatgctggtcaagaaaattcagcctttagcaaaagccacttccagatcaggctgtaaagttgatcttggaggttttgctggtctttttgatttaaaagcagctggtttcaaagatccccttctggcctctggaacagatggcgttggaactaaactaaagattgcccagctatgcaataaacatgataccattggtcaagatttggtagcaatgtgtgttaatgatattctggcacaaggagcagagcccctcttcttccttgattacttttcctgtggaaaacttgacctcagtgtaactgaagctgttgttgctggaattgctaaagcttgtggaaaagctggatgtgctctccttggaggtgaaacagcagaaatgcctgacatgtatccccctggagagtatgacctagctgggtttgccgttggtgccatggagcgagatcagaaactccctcacctggaaagaatcactgagggtgatgttgttgttggaatagcttcatctggtcttcatagcaatggatttagccttgtgaggaaaatcgtggcaaaatcttccctccagtactcctctccagcacctgatggttgtggtgaccagactttaggggacttacttctcacgcctaccagaatctacagccattcactgttacctgtcctacgttcaggacatgtcaaagcctttgcccatattactggtggaggattactagagaacatccccagagtcctccctgagaaacttggggtagatttagatgcccagacctggaggatccccagggtcttctcatggttgcagcaggaaggacacctctctgaggaagagatggccagaacatttaactgtggggttggcgctgtccttgtggtatcaaaggagcagacagagcagattctgagggatatccagcagcacaaggaagaagcctgggtgattggcagtgtggttgcacgagctgaaggttccccacgtgtgaaagtcaagaatctgattgaaagcatgcaaataaatgggtcagtgttgaagaatggctccctgacaaatcatttctcttttgaaaaaaaaaaggccagagtggctgtcttaatatctggaacaggatcgaacctgcaagcacttatagacagtactcgggaaccaaatagctctgcacaaattgatattgttatctccaacaaagccgcagtagctgggttagataaagcggaaagagctggtattcccactagagtaattaatcataaactgtataaaaatcgtgtagaatttgacagtgcaattgacctagtccttgaagagttctccatagacatagtctgtcttgcaggattcatgagaattctttctggcccctttgtccaaaagtggaatggaaaaatgctcaatatccacccatccttgctcccttcttttaagggttcaaatgcccatgagcaagccctggaaaccggagtcacagttactgggtgcactgtacactttgtagctgaagatgtggatgctggacagattattttgcaagaagctgttcccgtgaagaggggtgatactgtcgcaactctttctgaaagagtaaaattagcagaacataaaatatttcctgcagcccttcagctggtggccagtggaactgtacagcttggagaaaatggcaagatctgttgggttaaagaggaatgaagccttttaattcagaaatggggccagtttagaaagaattatttgctgtttgcatggtggttttttatcatggacttggcccaaaagaaaaactgctaaaagacaaaaaagacctcacccttacttcatctatttttttaataaatagagactcactaaaaacaagactagttagtgcagcatatctgagacaaaaaaaaaaaaaaaa

SEQ ID NO: 86 - protein, 1010 aa, Homo sapiens
MAARVLIIGSGGREHTLAWKLAQSHHVKQVLVAPGNAGTACSEKISNTAISISDHTALAQFCKEKKIEFVVVGPEAPLAAGIVGNLRSAGVQCFGPTAEAAQLESSKRFAKEFMDRHGIPTAQWKAFTKPEEACSFILSADFPALVVKASGLAAGKGVIVAKSKEEACKAVQEIMQEKAFGAAGETIVIEELLDGEEVSCLCFTDGKTVAPMPPAQDHKRLLEGDGGPNTGGMGAYCPAPQVSNDLLLKIKDTVLQRTVDGMQQEGTPYTGILYAGIMLTKNGPKVLEFNCRFGDPECQVILPLLKSDLYEVIQSTLDGLLCTSLPVWLENHTALTVVMASKGYPGDYTKGVEITGFPEAQALGLEVFHAGTALKNGKVVTHGGRVLAVTAIRENLISALEEAKKGLAAIKFEGAIYRKDVGFRAIAFLQQPRSLTYKESGVDIAAGNMLVKKIQPLAKATSRSGCKVDLGGFAGLFDLKAAGFKDPLLASGTDGVGTKLKIAQLCNKHDTIGQDLVAMCVNDILAQGAEPLFFLDYFSCGKLDLSVTEAVVAGIAKACGKAGCALLGGETAEMPDMYPPGEYDLAGFAVGAMERDQKLPHLERITEGDVVVGIASSGLHSNGFSLVRKIVAKSSLQYSSPAPDGCGDQTLGDLLLTPTRIYSHSLLPVLRSGHVKAFAHITGGGLLENIPRVLPEKLGVDLDAQTWRIPRVFSWLQQEGHLSEEEMARTFNCGVGAVLVVSKEQTEQILRDIQQHKEEAWVIGSVVARAEGSPRVKVKNLIESMQINGSVLKNGSLTNHFSFEKKKARVAVLISGTGSNLQALIDSTREPNSSAQIDIVISNKAAVAGLDKAERAGIPTRVINHKLYKNRVEFDSAIDLVLEEFSIDIVCLAGFMRILSGPFVQKWNGKMLNIHPSLLPSFKGSNAHEQALETGVTVTGCTVHFVAEDVDAGQIILQEAVPVKRGDTVATLSERVKLAEHKIFPAALQLVASGTVQLGENGKICWVKEE

SEQ ID NO: 87 - DNA, 4482 bp, Homo sapiens
  CDS (105)..(1304)
tgaggagccgcccggtcgcctgcgcgctccctccggcggcgtccccagcccgcggcccctctgctgccggcccccggctcgccggctgcgggagtggcctcaagatggatgaagacggcggcggcgagggtggtggcgtgcctgaagacctctcattagaagagagagaagaacttctagacattcgtcgaagaaaaaaggaacttattgatgacattgagaggctgaaatatgaaattgcagaggtgatgacagagatcgacaatctaacttccgtagaggagagcaaaacgactcagaggaacaaacagatagccatgggaagaaagaaattcaacatggatcccaaaaagggaattcagtttctaatagaaaatgacctgctacagagttccccagaagacgtcgcccagttcctttataaaggagaaggcctaaataagaccgtcattggggactacctgggtgaaagggatgaatttaatattaaagttcttcaagcctttgttgaactccatgagtttgctgatctcaaccttgtacaagccttaaggcagttcttatggagcttcaggctgcccggggaggcgcagaagattgatcgcatgatggaggctttcgcttctcgctactgcctgtgcaaccccggggtcttccagtccacagacacgtgctacgtgctgtcattcgccatcatcatgctcaacaccagcctccacaaccacaacgtgcgtgacaagcccacggcagaacggttcatcgccatgaaccgcggcatcaacgagggcggggacctccctgaggagctgctgaggaatttgtatgagagcattaagaacgagccatttaagatcccggaggacgacgggaacgacctgacccacaccttcttcaaccccgaccgcgagggctggctcctgaagctgggagggcgtgtgaagacctggaagcgccggtggttcatcctgaccgataactgcctctattactttgaatacacaacagataaggagcccaggggaatcatcccgttggaaaacctcagcatcagggaggtggaggacccccggaaacccaactgttttgagctctacaatcccagccacaaagggcaggtcatcaaggcctgtaagactgaggccgacggccgcgtggtagaggggaaccatgtggtgtaccggatctcagccccgagcccggaggagaaggaggagtggatgaaatccatcaaagccagtatcagcagagatcccttctatgacatgttggcaacgaggaaacgaaggattgccaataaaaaatagctttcctggctaaaagacccaggtaaaagacccaaccccagcagaaagacaccgcgggcggcccctccgcggaaggcgtggcagggaggcagtcgccctgcggtgcaagctgctgctccagagcataccgtggcccaggtggtatccccaaggcctcgtgccgtggctggggtcctgggaggtggtcgccctgcagtgcaagctgctgctccagagcgtaccgtggcccagactgatcctcgaggcctcctgccgtggctggggtcatggtcggctgcgcatgtccagaagcatttccttcctgcgaccatcccggcgcccctagggggagaagccaggacagcagcttccgctgtctccacagcagacacgggacggattccacagacgggagcctcattcgtaccatgccaaacgcattcactcggggcagtattaaccgttctagaaagccactgttttatagcaaaacaggaaaggaaaagctaccagttttttattcagaatttttctcagatatataggattatagcttttatatgcctttttatattctgaaattataacaaaagatactttctaacagtagtatttttagaatggcagctataaagttaactcctggacacaagtatatactgtgcactgaaaaaatatccatctacacagcacccaaggggagggctgggggcaccggcacgggggcagcgtgcagccctgccctgtcaggctgtcagacaagccccggggggcagcaggtgggctcgggacgggctgggggagggacggccatggcacttgggggctccagggtgactcccatgaggcctcccttcaaccaggctttttggccccacaaatactttaagcaaatcattaaaattataacagttaatggtttgggggtgtttaggctgtaactgctaactcctaggaaacagccttttccctggacacagatggtccatacgctgagccacgtgaaactgctgatgttttgtttagatgcacacacatggcagcgtttcatacaggtcagcaggttagaccggcttttgaccatattcatcgctatttaaaacctgtggcaaaatgaacgcttattttacagactttctaatttgaccagatttcttaatgaatagacacagaattaactaaaaacagtctcaccccatgtagtgcgccgtgtcctgagagaggtgccctccctacgaggagggaagaacaggccctggggtgcagaggcccggcacgtagagaacccagatagacgccggtggtggaactggtcaaactccacgcccgcctgggaggttgtcaggttgctgtggatgtaaggataggaggtgcccagtgctccgctcaaggaaggctggatctgggccccacctacagagagggctcagggctggaccgggggcattgtgtgcttgggccgacccgggccggtggcagacgctgttctctgtcgggagatttgcgtccccaggaccctgttacacagtgggctgttgggttggtggctggcttttcctctatggacttcctcttcctgccccacctgcataggcacacacaccttgaatctgcaccctctggagggcatctgtactcctgtgcaaaatgcccagtccagagacaaaacctcagactttgtgcacctaggtttccttctcagcagcggagactgttctttgagttgccttgaagtggaggccgagcggctgcgggcccttcgcctccctgcggctgaccttgatgtagctttaagtcacactagactgcagaggggtccgaggccagaaacccctgtcctgcatcagactttcattcccacgttcttaggctttgttactgatacctcaaatcggaagttttagttctgagaaaggcaagtcagcgttcttgaaatgcctgactggtagatatgcaactctggcctccagtcttccatgaaaataaatgctgcctggacccccacccagaccacacactgacggccggctccggcggtgcccacccctcaggctggcccggcacccaagactggccacagccagctctgtcagcatgttgtgctcggacaagctgtttccttcttctgaccaacccaggtgtgacctggggatgcagagctttctgttttgggtgttgggagaagcagcaggaaggagtcgccagatgatcaagctccccctttgctgtcatctgtgaatgagcttcgccaggtggtgggcacctgggagccatgcagaggctgtggtgctgagttagactccaggtactttgtggtcaaaggaaatcgcctagctccaggctgtgttaggacagtattagcatgaaggctgtgcgaccatcatgcctgctgatccttgaggcaggcctggtccagaaaactctgggtcagtgactgcgcagggccagccgctaccaggacggccctgaaacaggacacatctgttttttgtccctcaccctgggcaggccgcgtcacaatcacagtcctcctcctccccaccctgacgtctgagcgcagggcttgaattgttagtcccaactctggccaaagatacttttttccagagacagaggccaggaggcagtgaggggagccccgcggggaggcggcggcgactgccacagcccttccagcctgtcttgctggccgccctggttcatatttgagtttaattgtactgaccctggacccagataagcagcaactttgtgtctttggggtcacagaacattttggggcagtttaatgtggtaccaaactgaaaataggagctatttatagatggagcagcacttagtgcttcatagaaagcaatgcctatttttaaagttacaaacgcagatatctacatagatatgctttgctgagaagttaggtctgtggtagaccagaaaccacaaattgactttttttcttagaaaatatttctatttgcggtaaatatagtaatatgtaaataatgtacatctgttgatttctggagtgtctgttattcaatgatgtatatactcccacagctcgcatgaaggaacagcctctattgatacttggttgtaaagtgaagtaagattggagggtggatggctgtcagagctcttgcagatactgtgttcactaaataaaaatcacatgtattgttaaaaaaaaaaaaaaaaa

SEQ ID NO: 88 - protein, 399 aa, Homo sapiens
MDEDGGGEGGGVPEDLSLEEREELLDIRRRKKELIDDIERLKYEIAEVMTEIDNLTSVEESKTTQRNKQIAMGRKKFNMDPKKGIQFLIENDLLQSSPEDVAQFLYKGEGLNKTVIGDYLGERDEFNIKVLQAFVELHEFADLNLVQALRQFLWSFRLPGEAQKIDRMMEAFASRYCLCNPGVFQSTDTCYVLSFAIIMLNTSLHNHNVRDKPTAERFIAMNRGINEGGDLPEELLRNLYESIKNEPFKIPEDDGNDLTHTFFNPDREGWLLKLGGRVKTWKRRWFILTDNCLYYFEYTTDKEPRGIIPLENLSIREVEDPRKPNCFELYNPSHKGQVIKACKTEADGRVVEGNHVVYRISAPSPEEKEEWMKSIKASISRDPFYDMLATRKRRIANKK

SEQ ID NO: 89 - DNA, 10835 bp, Homo sapiens
  CDS (364)..(5436)
gcagaactttggcgggcaaggagacaaacagccacactgtgctgccggggaagagaagaagaaggaaaggccagacacacaggcgtcgtgcagctgcggaaggattccgtttcctgcagggggcggagggatttgacagcacggtaacttccggaaaagtcctgaacctcagtggaaaagccttgcaagaaacaataacaaacgggaggaggaagcgattctggggtttctgtgttgaacggttcttgtccgcgaagatgcgcttcggcctctgtcaggggacttgaacgggcttagtgggcttcagccagcttttctccaccggttccccacggggacccccccccccccccggccgttgcaatggcgggcgtggggccggggggctacgcggcggagttcgtgccaccgccagagtgccccgtctttgagccgagttgggaggagttcacagatccgctcagctttatcggccgcatccggcctttggcggagaaaaccggcatctgcaaaattcggccgcccaaggactggcagcctccatttgcctgtgaagtaaaaagctttcgtttcactccaagagtccagcgcctgaatgaacttgaggcaatgaccagagtgagattggatttcttggatcaactagcaaaattttgggaacttcaaggatctactctgaagatccctgtggtagagagaaaaatcctggatctgtatgctttgagcaagattgttgccagcaaaggaggttttgaaatggtcaccaaagagaagaaatggtctaaagtgggtagtcgcttgggatatctgccaggaaaaggaactgggtctcttttgaagtcacattatgaaagaattctctacccatatgagcttttccagtctggtgtgagccttatgggtgtgcagatgcctaatttagatcttaaagaaaaagtggagcctgaggttctcagcactgatacccaaacttccccagagccaggcacaaggatgaacattctgccgaagagaacaagacgtgtgaagactcagtcagaatctggagatgtgagtagaaacacggaactgaagaaacttcagatttttggggctgggcccaaggttgtgggcttggcaatgggaacaaaagataaagaagatgaggtcacccgaagacgaaaagttaccaacaggtcagacgcatttaacatgcaaatgagacaacggaaaggcactctctctgttaactttgttgatctctatgtttgtatgttttgtggtcggggaaacaatgaagataaattgcttttgtgtgatggatgtgatgacagctatcatacattttgtctaattcctccactacctgatgtgcccaaaggagactggaggtgtcctaaatgtgtcgccgaggaatgtagcaaacctcgagaagcctttggatttgaacaagctgtacgagagtatacacttcagagctttggagagatggcagataattttaagtctgattattttaatatgccagtccatatggttcccacagaactagtagaaaaggaattttggcggctggtaagcagcattgaagaagatgttattgtggaatatggagcagatatctcctcaaaagactttggaagtggatttccggtgaaggatgggcggagaaagattctgccagaagaagaggaatatgcactttctggttggaatttgaataacatgcctgtcctggaacagtctgttcttgcacatattaatgtggacatctctggtatgaaagtgccgtggctctatgtgggaatgtgcttctcttctttttgctggcacattgaggatcactggagttattccatcaactacttgcactggggggagccaaagacatggtatggtgtgccatctcatgctgcagagcaactggaggaggtgatgagagagctggcccccgagttatttgaatcccagcctgatcttctgcatcagttagttaccatcatgaaccccaacgtgctaatggagcatggtgtgcctgtgtacaggaccaatcagtgtgctggcgagtttgttgtgacatttcctcgtgcctatcactctggatttaaccagggctacaactttgctgaagctgtgaacttctgtactgctgactggttgcccattggacgtcaatgtgtaaatcattaccgacgcctaaggcgccactgtgtcttttcacacgaggaactaattttcaagatggcagcagatccagaatgcttagatgtggggctggctgccatggtctgcaaagaattgactctcatgactgaagaagaaacacgattaagagagtctgttgtacagatgggtgtcctgatgtcagaagaagaagtgtttgaacttgttcctgatgatgagcggcagtgttcagcatgcagaaccacatgttttctctctgctctcacatgttcctgtaatcctgagcggcttgtatgtctctaccatccaactgatctgtgcccctgccccatgcagaagaaatgtcttagatatcgctacccattagaagacctcccttctctgctatatggtgtaaaagtcagggcacagtcctatgacacttgggtcagtcgtgttacagaagcattgtctgctaacttcaaccacaaaaaagatttgattgaattgcgagtaatgctggaagatgctgaggataggaaatacccagagaatgatctctttcgaaaactcagggatgctgtaaaagaagctgagacctgtgcttctgtggctcagctgcttctgagcaaaaagcagaaacacagacagagcccagatagtgggaggactcggaccaaactgacagtggaagaattgaaggcctttgtccaacaactttttagtcttccgtgtgtcatcagccaagctcggcaagtaaagaatctgctagatgatgtggaagagtttcatgaacgtgctcaggaggccatgatggatgaaaccccagattcttccaaactccagatgttgatagatatgggctctagtctctatgtggaactccctgaattaccacgactgaagcaagagctacaacaggctcggtggttggacgaagtaagactgaccttatcagatccgcaacaagtcactttggatgtcatgaagaagctgatagactctggggtagggttggcaccccaccatgctgtggagaaagcaatggctgaactacaggagctccttacagtctctgaacgatgggaagaaaaggctaaggtctgcctacaggcaagaccgaggcacagtgtggcaagtttagaaagcattgtgaatgaagccaagaacattccagcctttctacccaatgtgttgtccttgaaagaagccttacaaaaggctcgagaatggaccgctaaagtggaagctattcagagtggcagcaattacgcttatttggagcagcttgagagcttgtctgcgaaaggacgccctattcctgtgcgtcttgaagcactgccgcaagtggaatcacaggtagcagcagcacgggcatggagagaacggactgggcggacgtttcttaagaagaattctagccatacattgttacaggtgctgagcccccggaccgacattggtgtatatgggagtggcaaaaataggaggaaaaaagtaaaagaactaatagaaaaagaaaaagaaaaggatctggacctggagcctctgagtgatctggaggaaggattggaggaaaccagagatacagccatggtggtggcagttttcaaagaacgggagcaaaaagagattgaagccatgcattctctcagagcagccaacctagccaagatgacaatggtggaccgcatagaagaagtaaaattttgcatttgccgcaagacagccagtgggtttatgctacagtgtgagctctgcaaagactggttccataacagctgtgttcctcttcctaaatcaagttcccaaaaaaaaggatccagctggcaagctaaagaagtaaaattcctttgccctctttgtatgcggtctcgaaggcccaggctagagactattctgtcactcctggtatcccttcagaagttgcccgtacggttgcctgaaggagaggccctgcagtgtttgacagaacgtgctatgagttggcaagatagagcgcggcaggctctagccacagatgaactatcctctgccctggccaaactatctgtgttgagccagcgtatggtggaacaggcggctcgagaaaaaactgaaaagatcatcagtgcagaactccaaaaagcagctgccaatccagacttacagggacacttacctagtttccagcagtctgcttttaaccgggtggtgagcagtgtgtcatcttctcctcgacaaacaatggactatgatgatgaagaaacagactctgatgaagacattcgagagacatatggctacgacatgaaggacacagccagtgtgaagtcctctagtagtcttgaacccaatcttttttgtgatgaagagattcccatcaaatccgaggaggtggtgacccacatgtggacagcaccttcattttgtgcagagcatgcttattcttctgcttctaagagttgttctcaaggttctagcaccccaaggaaacaacctcggaagagccctttggtgccccgaagtttggaacctccagtgctggagttgtcacctggagctaaggcacaactggaagaacttatgatggttggagatctcctggaagtatctctggacgagactcaacacatatggcggattttgcaggccacacacccaccctctgaagacagattcttgcatatcatggaggatgacagcatggaagagaaaccactaaaagtgaaaggaaaggactcttcagagaagaaacggaaacggaagctagaaaaggtagagcaactttttggagaaggaaaacagaagtccaaggagttaaagaaaatggacaaacctagaaagaagaaattaaaattaggtgcagacaaatcaaaggagctgaataaactggccaagaaactagcaaaagaagaagagagaaagaaaaagaaggagaaggctgctgcagccaaagttgaacttgtgaaagagagcactgaaaagaaaagagagaaaaaggtgctggacatcccctcaaagtatgactggtcaggagcagaggagtctgatgatgagaatgctgtgtgcgcagcacagaactgccaaaggccctgcaaggacaaggtagactgggtacaatgtgatggtggctgtgatgagtggtttcatcaagtttgtgtgggtgtatctccagaaatggctgaaaatgaagattacatctgtataaactgtgcaaagaagcaggggccagttagcccaggtccagcaccacctccttccttcataatgagctacaaactaccaatggaggatcttaaagagaccagttagcagatgcttggttagtttgggacatggggggacatggaccacattgagaccttagtcatcaagtagagtggtttatatccacttggaatgttgcttccaaagatgaatggccttcagagaaagtccccttagtgctggcttcctctttgcatggactctgtgggttacattctctatcaacatatctatgcagagggtgtcttctttggtacaacagccaatatttcatgtctcctttgagtgtggtttactgcattaaggccagatgcttaattgagctctagggtggctggttagtattaatacattggtgtgctaacagggcatataggatgtggcttttgtccagctgatagtagttagaggcttacaacttaggagcagcaccaactgaaggtgctaattgcttggatctccttcattgggatagttggagagggattggagtaccactttccttccactgttacctggtacttaatgccctaaagatacaactaggagtaacagggccaaagttatttctgttagacgtcaaggaatggtatcacagtctattgacctcagcgatttgtgcttgtttgtgctagaagaacatcccaaataggagaacctctcacaagctggggcaggtcaccttatctttgtaagatgaggatatcatctagatcagaaatctgactagattggattctgaggagaagaacctactacaaggcaaggagccgttttttggctttgaaaagtcttgctgtcttgggtctacattttagggaagagcaggtacatggatccaggcttctgccaaaaaaaaaaagagaagaagatgacgatgatgaccagtcgtactatcttactgagccacagtgatgcatgcttttcggggaaaacttcattcacaagtattccagacaccaggcttcaggcatggccatgagcaagaccagcaaataacagctttttgccttgcagccctgaccccaatgtctgctgtttccaacactggtgatttctaactacggcccacagcagatgctgttgaataacaccatggcttcatcagaggatgtggggttgtagtacctctgggtgatgaagttgttttagtaaatccatttttaaaaaaaaaaaaggacttgtttttacttttttctaaatgtctctgactactgactgttctatacatagattatttttccttttttaatatacatatatgaatatataaatatatatatttactgttaccagcagcatatgacagagtttcaacatcaaaaatccatttgggggcttgctttttcttttttgctttaaaaaaaaaaatcccattccttctttgtagtacaaggagttagcactccctcctccatcccagcctgaccagatcttccattttgcttttgttcatatagataattatatgtcctttgtgtgttgggacttgtccctgtctgttgggaaacttggtctcactctagtctgtgctggctcttttttcttttgtgtgtgaatgtttgaaactatggtgctgtgtcctcttccctcctgttgtgttctctgttcttcttaaggtattaggtaagctgtatgtaaactcttattagaaggggactaatttttttttaaaggacaaaaaaaaaaatgactaaaaatagtgttttgtcatcactgtctggtgtctttattttggtttaaaaaaatctgtggtttgacttaaattcatcagttttccttttaaaggggggattggggtggacctagcaacagcttatagtttcctcttccctttttgccccagtctcttttaaagaactgtcttctagtaactagaagtgaaatgtactgtccagttacagtttgagtgggtatgagatttaactcaaaaggaatcttacaaaaaaaaagatgttttcttataaaatccaatttctgtaaatgttttctctgaagttcatactacctactttttattcattcttaatactgtataacattttgagtgttttgacttgttcagaggtttgttagtgttgctgtgcatatgtcttgaggtctcatctgaagtaagtttgtgtatgatcgaagatttcaatggatattgcaaggtaactaattaactgatttcataagttttcgttttgccaagctaacgattatcaattaagaatttcctctggttgatgttatacaagaaagcacaatattttttgcctgttgatcttctttgtaacagtcttcagatatttgtgggttaaaaattgaatgtaattttaagtgacagatgcctggaatacatttaaaatttttatttttccttcctaatcatccattaactattccactatcagtggagagtcatgaggatgctgagaaagtatgaatagcttcctgtcaccttctgacgttttgaaacttaaatatgtcttttcgttgatactgtgggattttctgtatttacttgacagtcatggaggatttggtatgacttgaccacaggtttagaccaaggctgagaagaacagaagggagaaattaatggcaaaacaaaaaatacacaaatctgcggttttggaattaatgaaacaagattcatctatttaaagaaatgttggtgttctaatacaaagcattattttcacttagagaaaattacttacttgctcccttctgtattgtaatattttgtattaagacatgatttaaaatgtctttctacccttatctcctctaaactgcaactgaagttgcaattcttcatcattagtattttaactctggcaaaggttatagaaagaaaaatggaaatatggtaggcctgtggtattcttaaaagctaagtcattagaactatgcagatccccaagtttaaaagtacaaatacagcaccagtagttagctttctagctgggggagaagacaggagatttttcttccacagatgtttattttgcttcctgataggtactgcagcaaagccatgttgatgtgtagatgcatgacttcctcactaagctgctgcacaccagctttgcctgcatgattcaaatttgtgcctcagtaaaattataaattattgcatgtcataccttgaataatggaaacggcaaacattaaacctgtgattacccataatgtactttaataataaaaaacatggcagccaggtgcagtagagtgcacctgtggtcaggaggctgaagtgggaagattgcttcaacctgtgagtttgagtcccgcctggtcaacagcgagaccccatgtgtctgtctgtctctctctttttttaaaggacagaggctaagctgtaaggttagcatggttctgcctgggctttgcttctgtgcttctgtgcaggctgagctgtaaggttagcatggttctgcctgggctttgcttctgcgcttctgtgcaggctgagctgtaaggttagcatggttctgcctgggctttgcttctgcgcttctgtgcaggctgagctgtaaggttagcatggttctgcctgggctttgcttctgcgcttctgtgctagcaggtgcccacaaaatgtctttttgaatttcttaatttttgggttctggatgcaattcgtgcacgccaagaaactacttgcttgtcagtattttaattctgtagtacatgtgtgtgaatatcagccagtacttacagtaggaggatgaacagaaaaactgagaagacctgtctttcaaaagatgggtttatccactttttaagggaaaaagtgacagtttggcatgggatttgaaaagtggaaattgtggaaaaattgagctgttgaagtcccacatataaccagatttaataaagcttcacatgtgaattagctccatatgtgtgtagaaggttgcttttatagcaggtccttaagtactccttttgaaattcctcctttttttttaagtcataccattacttctttggatatgaatgtcccaagtggtatctcctactgtagtatgaggaagaatggctgttaatgtattttttgaattttggtcttgtcttggcctggatcatatccagtcaccactatgcaacaaatgatgtgcactgggcaaggatatgatgggttatgaaagctgtatcttgtttgttttttcttttgcagtactccaagtggtctaaacaggaatgtcttgtaaaacctcaagactccctattgattattcccttacatatttatttacaatttatcagggtaattggtggtgccttatgaaaagtataactcgatttcttgatctttgagcatgttttgtgtttcttgtgttttctaaaagaatattagatatggttaattgcattacatctaaaagatttaaaaaattgtgtgtatgctcaggttccccacacccatacccaccctaacccctgtcatttacattggtggcaactttaaatggtaaccaagcaaaagtacattttgataatgagtattgataatcctgaggaaaactagtgagtatatgggagccacctttgacctgtgccaaagcagtttctaatttcatttgctaactataaaataaagaactgagccaaaataatttgatcagtggtgtgattagcctattatcattgctgagaatagtgtttttggagtgtgaagtgattcctgaagatttcacctgccttctgtttccagcaagaatccagtgatgaccaacacatttcctcacttttggttcttgagaagtttatccctttgcaacaaaccattaatagggaaaacaaggaaatgctttccctttctctttggcttcttaaagctcacaaccaattcagaccccaagttacttcagagaagcaaatggcaccttttccccattgccaaggatcccagcttatgcagatatgaaggacggatcatttctgaaaatgttaagactctgcttgcagtggacttggcctcagtttcatgaaatgtgtaactctgtatgtgtatgttaggaggagggttggttgaaagagcgggggcagggaggggaatctgattacctcttgggaaataattttcttgccaacaaaaagatacacttgaagtttcttaaggtggcaagtccattaaaaaaaaaaattgtgttggaccctcccagtttagatcaagtatttcttgggggtcttgctattgtggttgataccaataaatggaagatccagaatattttcatttaaagctcaaccattaattggaacatggtgaaacattgtacacattgtaaaagtagggaacagtacaaaagaatggaatcaaatactatattatgtgaataaactagagtgattttggaatttcactctcttcaccccttctcacttgtatgttctgtaaagtgtatttctactttggtaggaagaaagacttgatttaatatttc

SEQ ID NO: 90 - protein, 1690 aa, Homo sapiens
MAGVGPGGYAAEFVPPPECPVFEPSWEEFTDPLSFIGRIRPLAEKTGICKIRPPKDWQPPFACEVKSFRFTPRVQRLNELEAMTRVRLDFLDQLAKFWELQGSTLKIPVVERKILDLYALSKIVASKGGFEMVTKEKKWSKVGSRLGYLPGKGTGSLLKSHYERILYPYELFQSGVSLMGVQMPNLDLKEKVEPEVLSTDTQTSPEPGTRMNILPKRTRRVKTQSESGDVSRNTELKKLQIFGAGPKVVGLAMGTKDKEDEVTRRRKVTNRSDAFNMQMRQRKGTLSVNFVDLYVCMFCGRGNNEDKLLLCDGCDDSYHTFCLIPPLPDVPKGDWRCPKCVAEECSKPREAFGFEQAVREYTLQSFGEMADNFKSDYFNMPVHMVPTELVEKEFWRLVSSIEEDVIVEYGADISSKDFGSGFPVKDGRRKILPEEEEYALSGWNLNNMPVLEQSVLAHINVDISGMKVPWLYVGMCFSSFCWHIEDHWSYSINYLHWGEPKTWYGVPSHAAEQLEEVMRELAPELFESQPDLLHQLVTIMNPNVLMEHGVPVYRTNQCAGEFVVTFPRAYHSGFNQGYNFAEAVNFCTADWLPIGRQCVNHYRRLRRHCVFSHEELIFKMAADPECLDVGLAAMVCKELTLMTEEETRLRESVVQMGVLMSEEEVFELVPDDERQCSACRTTCFLSALTCSCNPERLVCLYHPTDLCPCPMQKKCLRYRYPLEDLPSLLYGVKVRAQSYDTWVSRVTEALSANFNHKKDLIELRVMLEDAEDRKYPENDLFRKLRDAVKEAETCASVAQLLLSKKQKHRQSPDSGRTRTKLTVEELKAFVQQLFSLPCVISQARQVKNLLDDVEEFHERAQEAMMDETPDSSKLQMLIDMGSSLYVELPELPRLKQELQQARWLDEVRLTLSDPQQVTLDVMKKLIDSGVGLAPHHAVEKAMAELQELLTVSERWEEKAKVCLQARPRHSVASLESIVNEAKNIPAFLPNVLSLKEALQKAREWTAKVEAIQSGSNYAYLEQLESLSAKGRPIPVRLEALPQVESQVAAARAWRERTGRTFLKKNSSHTLLQVLSPRTDIGVYGSGKNRRKKVKELIEKEKEKDLDLEPLSDLEEGLEETRDTAMVVAVFKEREQKEIEAMHSLRAANLAKMTMVDRIEEVKFCICRKTASGFMLQCELCKDWFHNSCVPLPKSSSQKKGSSWQAKEVKFLCPLCMRSRRPRLETILSLLVSLQKLPVRLPEGEALQCLTERAMSWQDRARQALATDELSSALAKLSVLSQRMVEQAAREKTEKIISAELQKAAANPDLQGHLPSFQQSAFNRVVSSVSSSPRQTMDYDDEETDSDEDIRETYGYDMKDTASVKSSSSLEPNLFCDEEIPIKSEEVVTHMWTAPSFCAEHAYSSASKSCSQGSSTPRKQPRKSPLVPRSLEPPVLELSPGAKAQLEELMMVGDLLEVSLDETQHIWRILQATHPPSEDRFLHIMEDDSMEEKPLKVKGKDSSEKKRKRKLEKVEQLFGEGKQKSKELKKMDKPRKKKLKLGADKSKELNKLAKKLAKEEERKKKKEKAAAAKVELVKESTEKKREKKVLDIPSKYDWSGAEESDDENAVCAAQNCQRPCKDKVDWVQCDGGCDEWFHQVCVGVSPEMAENEDYICINCAKKQGPVSPGPAPPPSFIMSYKLPMEDLKETS

SEQ ID NO: 91 - DNA, 1388 bp, Homo sapiens
  CDS (112)..(1041)
gtctctgccaagcgcctgttggtaggaacctgcttggtcgcgtctgagggggcttgtaggtggctctggctgaaacaggcgcctgcgagagtctgtaggagggaaaccgccatggacgatcagggttgccctcggtgtaagaccaccaaatatcggaacccctccttgaagctgatggtgaatgtgtgcggacacactctctgtgaaagttgtgtagatttactgtttgtgagaggagctggaaactgccctgagtgtggtactccactcagaaagagcaacttcagggtacaactctttgaagatcccactgttgacaaggaggttgagatcaggaaaaaagtgctaaagatatacaataaaagggaagaagattttcctagtctaagagaatacaatgatttcttggaagaagtggaagaaattgttttcaacttgaccaacaatgtggatttggacaacaccaaaaagaaaatggagatataccaaaaggaaaacaaagatgttattcagaaaaataaattaaagctgactcgagaacaggaagaactggaagaagctttagaagtggaacgacaggaaaatgaacaaagaagattatttatacaaaaagaagaacaactgcagcagattctaaaaaggaagaataagcaggcttttttagatgagctggagagttctgatctccctgttgctctgcttttggctcagcataaagatagatctacccaattagaaatgcaacttgagaaacccaaacctgtaaaaccagtgacgttttccacaggcatcaaaatgggtcaacatatttcactggcacctattcacaagcttgaagaagctctgtatgaataccagccactgcagatagagacatatggaccacatgttcctgagcttgagatgctaggaagacttgggtatttaaaccatgtcagagctgcctcaccacaggaccttgctggaggctatacttcttctcttgcttgtcacagagcactacaggatgcattcagtgggcttttctggcagcccagttaaccatttataagatttggaccttggagctgaaccagggagctagcaaaagtaaagcagacttataaaattatagctatgtgcagctgcacaacacagtccttccactagcagctgtgttaaagtatttataaggagaaaatttcagaactaagttgagtaatataggggatatatatttgtgaaaaataatttttacttatatttttcagaggatttgacacgataagcctcatctgatggaagagaggaataaataattcacctatatgtgtttgaggttgtgacagacttataaaatctttttaaaaaataaagctataatttatattaaaaaaaaaaaaaataaa

SEQ ID NO: 92 - protein, 309 aa, Homo sapiens
MDDQGCPRCKTTKYRNPSLKLMVNVCGHTLCESCVDLLFVRGAGNCPECGTPLRKSNFRVQLFEDPTVDKEVEIRKKVLKIYNKREEDFPSLREYNDFLEEVEEIVFNLTNNVDLDNTKKKMEIYQKENKDVIQKNKLKLTREQEELEEALEVERQENEQRRLFIQKEEQLQQILKRKNKQAFLDELESSDLPVALLLAQHKDRSTQLEMQLEKPKPVKPVTFSTGIKMGQHISLAPIHKLEEALYEYQPLQIETYGPHVPELEMLGRLGYLNHVRAASPQDLAGGYTSSLACHRALQDAFSGLFWQPS

SEQ ID NO: 93 - DNA, 3616 bp, Homo sapiens
  CDS (103)..(2082)
ctctgctctcctcccagtctcccccgcgctgcgtgcagtaaggtagccgccgccgccgccgccgccgcgtcccctcgccggctcgctggtaccggcagtgccatggcggccttcagcaagtacttgacggcgcgaaactcctcgctggctggtgccgcgttcctgctgctctgcctgctccacaagcggcgccgcgccctcggcctgcacggtaagaaaagtggaaaaccaccattacagaacaatgagaaagaggggaaaaaggagcgagctgtggtggacaaggtgtttttctcaaggctcatacagattctgaaaatcatggtccctagaacattttgtaaagagacaggttacttggtacttattgctgttatgctggtgtctcgaacatattgtgatgtttggatgattcaaaatgggacactaattgaaagtggtatcattggtcgtagcaggaaagatttcaagagatacttactcaacttcatcgctgccatgcctcttatctctctggttaataacttcttgaagtatgggttaaatgagcttaaactgtgcttccgagtaaggctcactaaatacctctatgaggagtatcttcaagctttcacatattataaaatggggaatctggacaacagaatagctaatccagaccagctgcttacacaagatgtagaaaaattttgtaacagtgtagtcgatctgtattcaaatcttagtaagccatttttagacatagttttgtatatctttaagttaacgagtgcaattggagctcagggcccagcgagcatgatggcctacttggttgtttctgggctattcctaactcgacttcgaagacccattggtaagatgacaataactgagcaaaagtatgaaggagaatatagatatgttaattctcggctcatcacaaacagtgaagaaattgccttttacaatgggaataaaagagaaaagcagacagtccactcagtcttccgaaaactggtggaacacctacataatttcattttgtttcggttttcaatgggcttcattgatagtattattgccaaataccttgccactgttgttggttacctagttgtcagtcgccctttcttagatttgtctcatcctcgacatctcaagagtacacattcggaacttctagaggattactaccaaagtggaagaatgcttttgcgaatgtctcaagctctgggtcgaatagttttggctgggcgtgaaatgactagattggccggttttactgctcggattacagaattaatgcaagtactgaaggatttaaatcatggcaaatatgagcgcacaatggtctcacaacaggaaaagggtattgaaggagtacaagtcattcccttgatacctggtgctggagaaatcattattgcagataacattataaagtttgatcatgttcctttagcaacgccaaatggagatgttttgatccgagaccttaattttgaagttcgatctggggctaatgttctaatttgtggtccaaatggctgcggaaagagttcacttttccgtgttcttggtgaattatggcctctttttggaggacgtctaactaaacctgaaagaggaaaattattttatgttcctcagagaccttacatgacccttggaacacttcgagatcaagtgatatatccagatggacgagaagatcagaaaaggaagggaatttctgacctagtactgaaggaatacttagacaatgtccagttgggtcatatccttgaacgtgaaggaggctgggacagtgttcaggattggatggacgtactcagtggtggagaaaagcaaagaatggcgatggcaagattattttatcataaaccccagtttgccattttggatgaatgcacaagtgcagttagtgtcgacgtggaaggctacatttatagtcattgtcgaaaggttggcatcactctcttcactgtgtctcataggaaatctctttggaaacatcatgagtactacctgcatatggatggcagaggcaactatgaattcaaacagataacagaagatacagttgagtttggctcttagagaaatctggagaactatacctgcttcagtgaaataattacagaatatacttagaaaggcaaagtacattgtaaaataaagttgagcttagttttttttaaaaaaaaaaacaaagcaacaaattaactagatacagaataatggagaacaagttgttaaaacatttaatattatataggatattgctaattgtgtatatgttggtttaattaataatatgtactaagaatgtccttattcttgtggttaaaaacctgcctaaattaaattgggcttcaatcactgtaacctgattcatcctgggatgtaaaccattcgaagtcagctaattggacttttatggctctatcttttccttcagtgaagaaccctatttaaaactgggtcatcatttgtcctgttctagcaagatagtcttcagtttcattttcctgtgccctgtggtagttggaaacaaatcataatgtattatttaaatgtttaacatcattgcataacagcgtttattatacagtggcagatttctttagctgccacagtaatactcattccttgtgtgtgtcttggagtgcatttgactccaggaaaagccattttggttttccttaactaaatgataaatgtacccctctcagtctgcagtattgagttgtttaaagtatatgtgcagtcttgcttacaaggaggggttaccatgtatcacacctaatcttcccaatgtttgggatattaaaacacaaagtccttaacatgccaggctcaaggtcttataagagttctagatttttaagagaattagacaaatttgtgtgtgttagaagcccattcattagaagtgtggtggttatttggtattaaactccaaatgagccataggaaggcactacatgaaataatgcactgagtatgcaatgctatcactgtctttgactgtgattttatgtttaaaaagtatgttctaaaattattatatatacatgggtgaattatgtttccgaggcactgttttatctctgtgaatcttgaataacttttttatatttgggttatgatgtcaaacgatcctaagcgaagatgatttcagttcatcaaatcatcattaatgactttatgtattatttgcacagggagaattgaaactgagtataatcaataagctagatacgaaatcagtttctcaaactgagcttcagaaaggggcattttgtactcttgtttttgcataactggttttgtttttttgcagaattaactataacaatcactggctaccgaagtaaactgatgtactgaattccataatacataacattcaatttttaccacttctgtttagcgaacttgtatacttattttctgttcagattaaaaaaaaaaaaaaaaaactcagatatcctatacaacctttgcttgttctttttattctggtatctaaatactgagaagttcatttataattcagccttgacttgaaaacatagatagtttaatcttgacttgaaaaacacaaaaataaattcagaaaatgctttta

SEQ ID NO: 94 - protein, 659 aa, Homo sapiens
MAAFSKYLTARNSSLAGAAFLLLCLLHKRRRALGLHGKKSGKPPLQNNEKEGKKERAVVDKVFFSRLIQILKIMVPRTFCKETGYLVLIAVMLVSRTYCDVWMIQNGTLIESGIIGRSRKDFKRYLLNFIAAMPLISLVNNFLKYGLNELKLCFRVRLTKYLYEEYLQAFTYYKMGNLDNRIANPDQLLTQDVEKFCNSVVDLYSNLSKPFLDIVLYIFKLTSAIGAQGPASMMAYLVVSGLFLTRLRRPIGKMTITEQKYEGEYRYVNSRLITNSEEIAFYNGNKREKQTVHSVFRKLVEHLHNFILFRFSMGFIDSIIAKYLATVVGYLVVSRPFLDLSHPRHLKSTHSELLEDYYQSGRMLLRMSQALGRIVLAGREMTRLAGFTARITELMQVLKDLNHGKYERTMVSQQEKGIEGVQVIPLIPGAGEIIIADNIIKFDHVPLATPNGDVLIRDLNFEVRSGANVLICGPNGCGKSSLFRVLGELWPLFGGRLTKPERGKLFYVPQRPYMTLGTLRDQVIYPDGREDQKRKGISDLVLKEYLDNVQLGHILEREGGWDSVQDWMDVLSGGEKQRMAMARLFYHKPQFAILDECTSAVSVDVEGYIYSHCRKVGITLFTVSHRKSLWKHHEYYLHMDGRGNYEFKQITEDTVEFGS

SEQ ID NO: 95 - DNA, 4016 bp, Homo sapiens
  CDS (58)..(1740)
gcgctgtcgccgccgccgctgcagccggagttggaggagggagaagctaggaagaaaatggcggccgtggctgcagaggcggcagcgactgcagcgtcccccggggaggggggcgccggcgaggccgagccggagatggagcccatccccggcagtgaggccggcactgaccccctcccggtcacggccactgaagcgtctgtgccggatggcgagactgacgggcagcaatccgctcctcaggccgacgagccgccgctcccgccgccaccgccgccgccgggggagctcgcccgcagcccagaggcggtggggccggagctggaggctgaggagaaactgtccgttcgggtggcggagtcggcggcagccgcgcctcagggagggccggaacttccaccttctcctgcatcgccgccggagcagcccccggctcccgaggagcgcgaggagccgccgctgcctcagcccgtagccccggcgctcgtgccgccggcgggcggggactccacggtgtcgcaactgatcccgggctcggaggtgcgggtcacgctggaccacatcattgaggacgcgcttgtcgtgtcgttccgcttcggggagaagctcttctccggggtcctcatggatctgtccaaaaggtttgggccccatggtatccctgtgacagtatttcccaaaagggaatataaggataaaccagaagccatgccgctccaaagtaatacattccaagaagggacagaagtcaagtgtgaagcaaatggtgctgttcccgatgacccttctcctgtcccgcatcccgagctgagcttggctgaaagcctgtggacttccaaaccaccacctctcttccatgaaggagcaccttatcctccccctttgtttatcagggacacatataaccaatcaatacctcagccacctcctcggaaaattaagcgacccaaacgaaaaatgtacagggaagaacccacttcaataatgaatgctattaaactacgacccaggcaagttctgtgtgataaatgtaaaaacagtgttgttgctgaaaaaaaggaaattagaaaaggtagtagtgcaactgactcttctaaatatgaagataaaaaacggagaaatgaaagtgtaactactgtgaacaaaaaactgaaaactgaccataaagtggatgggaaaaaccaaaatgaaagccagaaaagaaatgctgtggttaaggtttcaaatattgctcacagcagaggcagagtagtaaaagtttctgctcaggcaaatacatcaaaagctcagttaagtactaaaaaagttctccagagtaagaacatggatcatgcgaaagctcgggaagtgttaaaaattgccaaagaaaaggcacaaaagaagcaaaatgaaacctctacttccaaaaatgcacattcaaaagtccatttcacacgtcgatatcagaatcctagctcaggttcccttccaccccgggttcgtttaaaaccacagaggtacaggaatgaagaaaatgactcttctctgaagacaggacttgagaaaatgcggagtggcaagatggcacccaagccccagtctcgctgcacctctacccgctcagcaggtctcaacaaatggcagctattacatcagacagtgacgagtcctgctgctcccttacagtgtctgacagaccactgtggattcagactgggagcattgaagttaacagtgaaacgggcagcacaaagacattagcaggctgctggtttcatggacctgtaccacaatgacacagagaacaccagagcatcaggactgaatgaaattggagtttttaaagctgcactaagaagtaaatgttaaggcagtggttaaaaacaacagtctataaaggggcacttgcaaattgtgctgtcttaaaccgaagaaaaggtattagggaatattttataaaaaataaacttgcaataaattatgcatgagatgaggagaaaaatgatgtgaattacacacgtaagaactcacttgaattttatatatgaagaaacactgacagtaacttctttggaatgtgaagttcttatcagtacagtttggacaggcctaaaaggcatgggatgatgcagaaatgctgaattatttttcatacttaaactttgtgctttctccaaggtttaggttaatcagttcagatatgagcaaaggtatttctaaaatggctcttctatgaaaagcaatagtcacatatgccaaggccaatgtttccttcaaggtgccagtagaaacaacagaaaataacatcctgctgaaaggatggcaaagtgccccgccccaccccacaaacacaatttggatcttttccttctttaataaagcagggctgtattatcttgaatatatgtttgcttgttagaacatattaagatatatttatttgccactagtatttaacattttgtgcacattttcataattacattcttacctttcaaattttgactcaaagtggataggctagtgttgatattggagtgcaaatgtatatactccaagagctagttcttaattctgctgagttggaaagccttttattattgtctgtatccttactggttttatctagttcaaaaaaggtgacaacgtctaaattttgatgtggacctctctccatagagagccgctcctaagtgcaagaaattccaacaggtgtcagtaggacttggccctgggggacaacaagtggcaggaacaggatcctttaaaacagtgtcaaacttctcatgcatggagcatgaattcttactaatagagactgtagtttttttcttgtctttggtaaatatataaaagaccttaatttttcttttttaatgaatggagaaaacatgagaaaaccagatggacctgttagtactacatttttaaggcattttatatttgatggtgccgtacttttaataataataaaactgaagttttttagtggcaatactgatttattttttaaaccagaaagataatccatattgattacttactacaaaaaagggaaaatatgccaaaaaataaaaaaccttaaaattcatatgaagcaacgtaacagataactgagcacttggctcaagtggtcagacttttcataatgttactgtgtaagtttggaattacctaataaccccaggctcaggattaacagaaggttctgggtgagttttaaaacatttaatatacctatgatttgttttacaacttgaagaaaaggcaggcagtcttgtgtctaatgagcttaatgcaaattctaattatactgcaaataatttaaagttttgattgcattctacaattgtctgtttggaaaattacatattatgaagtcattatatattttatcaaatcagaaaaagtcagctcaggaactgtagcagcagggagttctaaagatgacatgaactatactataggggtgccctactctatatggcctagggctttggtttgggtcagtcttgttctttcagatacataacaccagcagtactttcgggctcacttcaagaaccagataactctcccaaaccatgatacatgaagtgtataatcaagatttttaattaagctttagaattctttatttgtgtagagtgatggaaatgaccaagaagtaataatataaagcaaaagaattgggagagatcaggttttaagtatataaatattttttttttctcatggcatattctcaaaggtgttttgttacaaaccagattttcattttttaaaaaatgagacttggtggtatttaaaacctacacctaccatgttgctatttcactttcattgctttagttgcttaatatttaagctttgcttcatgctaccttttgtctgtatttcaatcttcataagcctattttgttttgtagacttgaatgataaaaattgtttctcatcttaagtatgctcagagttttaaatgttaaagaatgttgtgtaacctttatccaataaagtctttgattttttaaaaaaaa

SEQ ID NO: 96 - protein, 560 aa, Homo sapiens
MAAVAAEAAATAASPGEGGAGEAEPEMEPIPGSEAGTDPLPVTATEASVPDGETDGQQSAPQADEPPLPPPPPPPGELARSPEAVGPELEAEEKLSVRVAESAAAAPQGGPELPPSPASPPEQPPAPEEREEPPLPQPVAPALVPPAGGDSTVSQLIPGSEVRVTLDHIIEDALVVSFRFGEKLFSGVLMDLSKRFGPHGIPVTVFPKREYKDKPEAMPLQSNTFQEGTEVKCEANGAVPDDPSPVPHPELSLAESLWTSKPPPLFHEGAPYPPPLFIRDTYNQSIPQPPPRKIKRPKRKMYREEPTSIMNAIKLRPRQVLCDKCKNSVVAEKKEIRKGSSATDSSKYEDKKRRNESVTTVNKKLKTDHKVDGKNQNESQKRNAVVKVSNIAHSRGRVVKVSAQANTSKAQLSTKKVLQSKNMDHAKAREVLKIAKEKAQKKQNETSTSKNAHSKVHFTRRYQNPSSGSLPPRVRLKPQRYRNEENDSSLKTGLEKMRSGKMAPKPQSRCTSTRSAGLNKWQLLHQTVTSPAAPLQCLTDHCGFRLGALKLTVKRAAQRH

SEQ ID NO: 97 - DNA, 3059 bp, Homo sapiens
  CDS (224)..(2722)
tcctctgcgtcccgccccgggagtggctgcgaggctaggcgagccgggaaagggggcgccgcccagccccgagccccgcgccccgtgccccgagcccggagccccctgcccgccgcggcaccatgcgcgccgagccggcgtgaccggctccgcccgcggccgccccgcagctagcccggcgctctcgccggccacacggagcggcgcccgggagctatgagccatgaagccgcccggcagcagctcgcggcagccgcccctggcgggctgcagccttgccggcgcttcctgcggcccccaacgcggccccgccggctcggtgcctgccagcgccccggcccgcacgccgccctgccgcctgcttctcgtccttctcctgctgcctccgctcgccgcctcgtcccggccccgcgcctggggggctgctgcgcccagcgctccgcattggaatgaaactgcagaaaaaaatttgggagtcctggcagatgaagacaatacattgcaacagaatagcagcagtaatatcagttacagcaatgcaatgcagaaagaaatcacactgccttcaagactcatatattacatcaaccaagactcggaaagcccttatcacgttcttgacacaaaggcaagacaccagcaaaaacataataaggctgtccatctggcccaggcaagcttccagattgaagccttcggctccaaattcattcttgacctcatactgaacaatggtttgttgtcttctgattatgtggagattcactacgaaaatgggaaaccacagtactctaagggtggagagcactgttactaccatggaagcatcagaggcgtcaaagactccaaggtggctctgtcaacctgcaatggacttcatggcatgtttgaagatgataccttcgtgtatatgatagagccactagagctggttcatgatgagaaaagcacaggtcgaccacatataatccagaaaaccttggcaggacagtattctaagcaaatgaagaatctcactatggaaagaggtgaccagtggccctttctctctgaattacagtggttgaaaagaaggaagagagcagtgaatccatcacgtggtatatttgaagaaatgaaatatttggaacttatgattgttaatgatcacaaaacgtataagaagcatcgctcttctcatgcacataccaacaactttgcaaagtccgtggtcaaccttgtggattctatttacaaggagcagctcaacaccagggttgtcctggtggctgtagagacctggactgagaaggatcagattgacatcaccaccaaccctgtgcagatgctccatgagttctcaaaataccggcagcgcattaagcagcatgctgatgctgtgcacctcatctcgcgggtgacatttcactataagagaagcagtctgagttactttggaggtgtctgttctcgcacaagaggagttggtgtgaatgagtatggtcttccaatggcagtggcacaagtattatcgcagagcctggctcaaaaccttggaatccaatgggaaccttctagcagaaagccaaaatgtgactgcacagaatcctggggtggctgcatcatggaggaaacaggggtgtcccattctcgaaaattttcaaagtgcagcattttggagtatagagactttttacagagaggaggtggagcctgccttttcaacaggccaacaaagctatttgagcccacggaatgtggaaatggatacgtggaagctggggaggagtgtgattgtggttttcatgtggaatgctatggattatgctgtaagaaatgttccctctccaacggggctcactgcagcgacgggccctgctgtaacaatacctcatgtctttttcagccacgagggtatgaatgccgggatgctgtgaacgagtgtgatattactgaatattgtactggagactctggtcagtgcccaccaaatcttcataagcaagacggatatgcatgcaatcaaaatcagggccgctgctacaatggcgagtgcaagaccagagacaaccagtgtcagtacatctggggaacaaaggctgcagggtctgacaagttctgctatgaaaagctgaatacagaaggcactgagaagggaaactgcgggaaggatggagaccggtggattcagtgcagcaaacatgatgtgttctgtggattcttactctgtaccaatcttactcgagctccacgtattggtcaacttcagggtgagatcattccaacttccttctaccatcaaggccgggtgattgactgcagtggtgcccatgtagttttagatgatgatacggatgtgggctatgtagaagatggaacgccatgtggcccgtctatgatgtgtttagatcggaagtgcctacaaattcaagccctaaatatgagcagctgtccactcgattccaagggtaaagtctgttcgggccatggggtgtgtagtaatgaagccacctgcatttgtgatttcacctgggcagggacagattgcagtatccgggatccagttaggaaccttcacccccccaaggatgaaggacccaagggtcctagtgccaccaatctcataataggctccatcgctggtgccatcctggtagcagctattgtccttgggggcacaggctggggatttaaaaatgtcaagaagagaaggttcgatcctactcagcaaggccccatctgaatcagctgcgctggatggacaccgccttgcactgttggattctgggtatgacatactcgcagcagtgttactggaactattaagtttgtaaacaaaacctttgggtggtaatgactacggagctaaagttggggtgacaaggatggggtaaaagaaaactgtctcttttggaaataatgtcaaagaacacctttcaccacctgtcagtaaacgggggagggggcaaaagaccatgctataaaaagaactgttccagaatcttttttttccctaatggacgaaggaacaacacacacacaaaaattaaatgcaataaaggaatcattaaaaaaaaaaa

SEQ ID NO: 98 - protein, 832 aa, Homo sapiens
MKPPGSSSRQPPLAGCSLAGASCGPQRGPAGSVPASAPARTPPCRLLLVLLLLPPLAASSRPRAWGAAAPSAPHWNETAEKNLGVLADEDNTLQQNSSSNISYSNAMQKEITLPSRLIYYINQDSESPYHVLDTKARHQQKHNKAVHLAQASFQIEAFGSKFILDLILNNGLLSSDYVEIHYENGKPQYSKGGEHCYYHGSIRGVKDSKVALSTCNGLHGMFEDDTFVYMIEPLELVHDEKSTGRPHIIQKTLAGQYSKQMKNLTMERGDQWPFLSELQWLKRRKRAVNPSRGIFEEMKYLELMIVNDHKTYKKHRSSHAHTNNFAKSVVNLVDSIYKEQLNTRVVLVAVETWTEKDQIDITTNPVQMLHEFSKYRQRIKQHADAVHLISRVTFHYKRSSLSYFGGVCSRTRGVGVNEYGLPMAVAQVLSQSLAQNLGIQWEPSSRKPKCDCTESWGGCIMEETGVSHSRKFSKCSILEYRDFLQRGGGACLFNRPTKLFEPTECGNGYVEAGEECDCGFHVECYGLCCKKCSLSNGAHCSDGPCCNNTSCLFQPRGYECRDAVNECDITEYCTGDSGQCPPNLHKQDGYACNQNQGRCYNGECKTRDNQCQYIWGTKAAGSDKFCYEKLNTEGTEKGNCGKDGDRWIQCSKHDVFCGFLLCTNLTRAPRIGQLQGEIIPTSFYHQGRVIDCSGAHVVLDDDTDVGYVEDGTPCGPSMMCLDRKCLQIQALNMSSCPLDSKGKVCSGHGVCSNEATCICDFTWAGTDCSIRDPVRNLHPPKDEGPKGPSATNLIIGSIAGAILVAAIVLGGTGWGFKNVKKRRFDPTQQGPI

SEQ ID NO: 99 - DNA, 951 bp, Homo sapiens
  CDS (1)..(951)
atgaagatagcaaacaacacagtagtgacagaatttatcctccttggtctgactcagtctcaagatattcagctcttggtctttgtgctgatcttaattttctaccttatcatcctccctggaaattttctcattattttcaccataaggtcagaccctgggctcacagcccccctctatttctttctgggcaacttggccttcctggatgcatcctactccttcattgtggctcccaggatgttggtggacttcttctctgagaagaaggtaatctcctacagaggctgcatcactcagctctttttcttgcacttccttggaggaggggagggattactccttgttgtgatggcctttgaccgctacatcgccatctgccggcctctgcactgttcaactgtcatgaaccctagagcctgctatgcaatgatgttggctctgtggcttgggggttttgtccactccattatccaggtggtcctcatcctccgcttgcctttttgtggcccaaaccagctggacaacttcttctgtgatgtccgacaggtcatcaagctggcttgcaccgacatgtttgtggtggagcttctgatggtcttcaacagtggcctgatgacactcctgtgctttctggggcttctggcttcctatgcagtcatcctctgccatgttcgtagggcagcttctgaagggaagaacaaggccatgtccatgtgcaccactcgtgtcattattatacttcttatgtttggacctgctatcttcatctacatgtgccctttcagggccttaccagctgacaagatggtttctctctttcacacagtgatctttccattgatgaatcctatgatttatacccttcgcaaccaggaagtgaaaacttccatgaagaggttattgagtcgacatgtagtctgtcaagtggattttataataagaaactga

SEQ ID NO: 100 - protein, 316 aa, Homo sapiens
MKIANNTVVTEFILLGLTQSQDIQLLVFVLILIFYLIILPGNFLIIFTIRSDPGLTAPLYFFLGNLAFLDASYSFIVAPRMLVDFFSEKKVISYRGCITQLFFLHFLGGGEGLLLVVMAFDRYIAICRPLHCSTVMNPRACYAMMLALWLGGFVHSIIQVVLILRLPFCGPNQLDNFFCDVRQVIKLACTDMFVVELLMVFNSGLMTLLCFLGLLASYAVILCHVRRAASEGKNKAMSMCTTRVIIILLMFGPAIFIYMCPFRALPADKMVSLFHTVIFPLMNPMIYTLRNQEVKTSMKRLLSRHVVCQVDFIIRN

SEQ ID NO: 101 - DNA, 2752 bp, Homo sapiens
  CDS (29)..(1921)
cgctaaggccgccctccgggtagccgccatgtcggtctccagcggcgtccagattctgacaaagccagagaccgtggaccggaggagaagtgcggaaacgaccaaagaggccgggcgaccactggagatggctgtgtccgagcccgaggccagcgccgcggaatggaagcaactggatcctgctcagagcaacctgtataatgatgtgatgctggagaactactgcaaccaagcctcaatggggtgtcaagctcccaaaccagacatgatctccaagttggaaaaaggagaagcaccatggttggggaaggggaaaagacccagtcaaggttgtccaagtaaaatagcaagacccaagcaaaaagaaactgatggaaaagtccagaaagatgatgaccagcttgaaaatatccagaaatctcaaaacaaactcctcagggaagttgcagtcaagaagaaaactcaagctaagaagaatggcagtgactgtggttcactggggaaaaaaaataatttgcataaaaaacatgttccttcaaagaaaaggcttcttaaatttgagtcatgtggaaaaattttgaaacagaatttagatttacctgatcactcaagaaactgtgtaaaaaggaaatctgatgcagctaaagaacacaagaagtcattcaaccatagcttatctgatacaaggaaaggcaaaaagcaaactggaaagaaacatgagaaattatccagccatagctcatctgataagtgtaacaaaactggcaaaaaacatgacaaattatgctgtcatagttcatcccatattaaacaggacaaaattcaaactggagagaaacatgagaaatcacccagccttagctcatctactaagcatgaaaaacctcaagcttgtgtgaaaccctatgaatgtaatcaatgtggaaaggttctcagccataaacaaggactcattgaccatcagagagttcatactggggagaaaccatatgaatgtaatgaatgtgggatagcctttagccaaaagtcacaccttgttgtacatcagagaactcacaccggagaaaaaccatatgaatgtattcagtgtggcaaagcccatggtcataaacatgcactcactgaccatctaagaattcatactggagaaaagccctatgaatgtgctgaatgtgggaaaaccttcagacacagctcaaaccttattcaacatgtgagatctcacacaggtgagaagccatatgaatgtaaggaatgtgggaagtcttttaggtataactcatctcttaccgaacatgtgagaacacatacaggtgaaataccatatgaatgcaatgaatgtggaaaagcctttaagtatagctcatcccttactaaacacatgagaattcatacaggtgagaaaccctttgaatgtaatgaatgtgggaaagctttcagcaagaagtcacacctcattatacatcaaagaactcatactaaggagaaaccttataaatgtaatgagtgtggaaaagcctttggacatagctcatctcttacttaccatatgagaactcatacaggtgaaagtccctttgaatgtaatcaatgtgggaaaggctttaaacaaattgaaggccttactcaacatcagagagttcatactggagagaaaccgtatgagtgtaatgaatgtgggaaagcctttagccaaaagtctcacctcattgtacatcagagaactcatactggggagaaaccttatgaatgtaacgaatgtgaaaaagcctttaatgcaaaatcacagcttgttatacatcagcgatcccacactggagaaaaaccctatgaatgtaatgaatgtgggaaaactttcaaacaaaatgcatccctaaccaaacatgtgaaaactcattcagaagataaatctcatgagtgaagttaatgtgggaaatttgttaactaaatttaaggttttgttgaaccttggaaatatgctgattttaaagagtgttagaaagcctttagcaagatgtcacaccttgttgtacatgagaaactttgaaaatggatcttcatatagaatcagtggatggaaacaagggtttaaacttgatacaaaaccttttataaaaaatattgttttaactactcaattattataaatgatctacatgttcagattgaaattgaaagctttaaaaattgtgaattatttgaatattcaaagcaatggagaaacaagttatatatgctgacagttcctgtgtttcttcttgttttgtacttaagcaccatatattagagttgaatttgcatatctgtttattgccttatgtaaatgagtgtggccatctgtataagcctctttgacattttcacccagctctttcttaatgtctgtgttggcttctgcatcagcagaaatctttttaaaagggttgttatatatgtaaaaaatgttaacaggaaaatgagagaaaataaagcagctgaggatacaaatgtgctggtagggagcgatattcaagatatattgtgaagtgtgaaaaagtaggttgctgaaccatgtatatagtatgttcccctttgtgtacaaaagggtatgtttgtttaacctctgtctcttatctctgtatgtgtatgtatctttgtatgcatatatacatgtatctgtatgtgaatagactttgaaaaaatacagaataaacttcatggtggttgccattgggcagaggagtataggactggggtctaggataggagcaag

SEQ ID NO: 102 - protein, 630 aa, Homo sapiens
MSVSSGVQILTKPETVDRRRSAETTKEAGRPLEMAVSEPEASAAEWKQLDPAQSNLYNDVMLENYCNQASMGCQAPKPDMISKLEKGEAPWLGKGKRPSQGCPSKIARPKQKETDGKVQKDDDQLENIQKSQNKLLREVAVKKKTQAKKNGSDCGSLGKKNNLHKKHVPSKKRLLKFESCGKILKQNLDLPDHSRNCVKRKSDAAKEHKKSFNHSLSDTRKGKKQTGKKHEKLSSHSSSDKCNKTGKKHDKLCCHSSSHIKQDKIQTGEKHEKSPSLSSSTKHEKPQACVKPYECNQCGKVLSHKQGLIDHQRVHTGEKPYECNECGIAFSQKSHLVVHQRTHTGEKPYECIQCGKAHGHKHALTDHLRIHTGEKPYECAECGKTFRHSSNLIQHVRSHTGEKPYECKECGKSFRYNSSLTEHVRTHTGEIPYECNECGKAFKYSSSLTKHMRIHTGEKPFECNECGKAFSKKSHLIIHQRTHTKEKPYKCNECGKAFGHSSSLTYHMRTHTGESPFECNQCGKGFKQIEGLTQHQRVHTGEKPYECNECGKAFSQKSHLIVHQRTHTGEKPYECNECEKAFNAKSQLVIHQRSHTGEKPYECNECGKTFKQNASLTKHVKTHSEDKSHE

SEQ ID NO: 103 - DNA, 1266 bp, Homo sapiens
  CDS (79)..(735)
tgtcccctctccggagctcttatactctgagccctgctcggtttaggcctgtctgcggaatccgcaccaaccagcaccatgcccatgatactggggtactgggacatccgcgggctggcccacgccatccgcctgctcctggaatacacagactcaagctatgaggaaaagaagtacacgatgggggacgctcctgattatgacagaagccagtggctgaatgaaaaattcaagctgggcctggactttcccaatctgccctacttgattgatggggctcacaagatcacccagagcaacgccatcttgtgctacattgcccgcaagcacaacctgtgtggggagacagaagaggagaagattcgtgtggacattttggagaaccagaccatggacaaccatatgcagctgggcatgatctgctacaatccagaatttgagaaactgaagccaaagtacttggaggaactccctgaaaagctaaagctctactcagagtttctggggaagcggccatggtttgcaggaaacaagatcacttttgtagattttctcgtctatgatgtccttgacctccaccgtatatttgagcccaagtgcttggacgccttcccaaatctgaaggacttcatctcccgctttgagggcttggagaagatctctgcctacatgaagtccagccgcttcctcccaagacctgtgttctcaaagatggctgtctggggcaacaagtagggccttgaaggccaggaggtgggagtgaggagcccatactcagcctgctgcccaggctgtgcagcgcagctggactctgcatcccagcacctgcctcctcgttcctttctcctgtttattcccatctttactcccaagacttcattgtccctcttcactccccctaaacccctgtcccatgcaggccctttgaagcctcagctacccactatccttcgtgaacatcccctcccatcattacccttccctgcactaaagccagcctgaccttccttcctgttagtggttgtgtctgctttaaagggcctgcctggcccctcgcctgtggagctcagccccgagctgtccccgtgttgcatgaaggagcagcattgactggtttacaggccctgctcctgcagcatggtccctgccttaggcctacctgatggaagtaaagcctcaaccacaaaaaaaaaaaaaaaaaaaaaaaaaaaaaaaaaaaaaaaaaaaaaaaaaaaaaaaaaaaaaaaaaaaaaaaaaaaaaaaaaa

SEQ ID NO: 104 - protein, 218 aa, Homo sapiens
MPMILGYWDIRGLAHAIRLLLEYTDSSYEEKKYTMGDAPDYDRSQWLNEKFKLGLDFPNLPYLIDGAHKITQSNAILCYIARKHNLCGETEEEKIRVDILENQTMDNHMQLGMICYNPEFEKLKPKYLEELPEKLKLYSEFLGKRPWFAGNKITFVDFLVYDVLDLHRIFEPKCLDAFPNLKDFISRFEGLEKISAYMKSSRFLPRPVFSKMAVWGNK

SEQ ID NO: 105 - DNA, 3680 bp, Homo sapiens
  CDS (399)..(2975)
tgagtaaatgccgcagattctggaaagttctgatcagtgcgatacataaggctgaggaagtgggacctccccttttgggtcggtagttcagcgccggcgccggtgtgcgagccgcggcagagtgaggcaggcaacccgaggtgcggagcgacctgcggaggctgagccccgctttctcccagggtttcttatcagccagccgccgctgtccccgggggagtaggaggctcctgacaggccgcggctgtctgtgtgtccttctgagtgtcagaggaacggccagaccccgcgggccggagcagaacgcggccagggcagaaagcggcggcaggagaagcaggcagggggccggaggacgcagaccgagacccgaggcggaggcggaccgcgagccggccatgtcggtggtggggttggacgtgggctcgcagagctgctacatcgcggtagcccgggccgggggcatcgagaccatcgccaatgagttcagcgaccggtgcaccccgtcagtcatatcatttggatcaaaaaatagaacaatcggagttgcagccaaaaatcagcaaatcactcatgcaaacaatacggtgtctaacttcaaaagatttcatggccgagcattcaatgaccccttcattcaaaaggagaaggaaaacttgagttacgatttggttccattgaaaaatggtggagttggaataaaggtaatgtacatgggtgaagaacatctatttagtgtggagcagataacagccatgttgttgactaagctgaaggaaactgctgaaaacagcctcaagaaaccagtaacagattgtgttatttcagtcccctccttctttacagatgctgagaggcgatctgtgttagatgctgcacagattgttggcctaaactgtttaagacttatgaatgacatgacagctgttgctttgaattacggaatttataagcaggatctcccaagcctggatgagaaacctcggatagtggtttttgttgatatgggacattcagcttttcaagtgtctgcttgtgcttttaacaagggaaaattgaaggtactgggaacagcttttgatcctttcttaggaggaaaaaacttcgatgaaaagttagtggaacatttttgtgcagaatttaaaactaagtacaagttggatgcaaaatccaaaatacgagcactcctacgtctgtatcaggaatgtgaaaaactgaaaaagctaatgagctctaacagcacagaccttccactgaatatcgaatgctttatgaatgataaagatgtttccggaaagatgaacaggtcacaatttgaagaactctgtgctgaacttctgcaaaagatagaagtacccctttattcactgttggaacaaactcatctcaaagtagaagatgtgagtgcagttgagattgttggaggcgctacacgaattccagctgtgaaggaaagaattgccaaattctttggaaaagatattagcacaacactcaatgcagatgaagcagtagccagaggatgtgcattacagtgtgcaatactttccccggcatttaaagttagagaattttccgtcacagatgcagttccttttccaatatctctgatctggaaccatgattcagaagatactgaaggtgttcatgaagtctttagtcgaaaccatgctgctcctttctccaaagttctcacctttctgagaagggggccttttgagctagaagctttctattctgatccccaaggagttccatatccagaagcaaaaataggccgctttgtagttcagaatgtttctgcacagaaagatggagaaaaatctagagtaaaagtcaaagtgcgagtcaacacccatggcattttcaccatctctacggcatctatggtggagaaagtcccaactgaggagaatgaaatgtcttctgaagctgacatggagtgtctgaatcagagaccaccagaaaacccagacactgataaaaatgtccagcaagacaacagtgaagctggaacacagccccaggtacaaactgatgctcaacaaacctcacagtctcccccttcacctgaacttacctcagaagaaaacaaaatcccagatgctgacaaagcaaatgaaaaaaaagttgaccagcctccagaagctaaaaagcccaaaataaaggtggtgaatgttgagctgcctattgaagccaacttggtctggcagttagggaaagaccttcttaacatgtatattgagacagagggtaagatgataatgcaagataaattggaaaaagaaaggaatgatgctaaaaatgcagttgaggaatatgtgtatgagttcagagacaagctgtgtggaccatatgaaaaatttatatgtgagcaggatcatcaaaattttttgagactcctcacagaaactgaagactggctgtatgaagaaggagaggaccaagctaaacaagcatatgttgacaagttggaagaattaatgaaaattggcactccagttaaagttcggtttcaggaagctgaagaacggccaaaaatgtttgaagaactaggacagaggctgcagcattatgccaagatagcagctgacttcagaaataaggatgagaaatacaaccatattgatgagtctgaaatgaaaaaagtggagaagtctgttaatgaagtgatggaatggatgaataatgtcatgaatgctcaggctaaaaagagtcttgatcaggatccagttgtacgtgctcaggaaattaaaacaaaaatcaaggaattgaacaacacatgtgaacccgttgtaacacaaccgaaaccaaaaattgaatcacccaaactggaaagaactccaaatggcccaaatattgataaaaaggaagaagatttagaagacaaaaacaattttggtgctgaacctccacatcagaatggtgaatgttaccctaatgagaaaaattctgttaatatggacttggactagataaccttaaattggcctattccttcaattaataaaatatttttgccatagtatgtgactctacataacatactgaaactatttatattttcttttttaaggatatttagaaattttgtgtattatatggaaaaagaaaaaaagcttaagtctgtagtctttatgatcctaaaagggaaaattgccttggtaactttcagattcctgtggaattgtgaattcatactaagctttctgtgcagtctcaccatttgcatcactgaggatgaaactgacttttgtcttttggagaaaaaaaactgtactgcttgttcaagagggctgtgattaaaatctttaagcatttgttcctgccaaggtagttttcttgcattttgctctccattcagcatgtgtgtgggtgtggatgtttataaacaagactaagtctgacttcataagggctttctaaaaccatttctgtccaagagaaaatgactttttgctttgatattaaaaattcaatgagtaaaacaaaagctagtcaaatgtgttagcagcatgcagaacaaaaactttaaactttctctctcactatacagtatattgtcatgtgaaagtgtggaatggaagaaatgtcgatcctgttgtaactgattgtgaacacttttatgagctttaaaataaagttcatcttatggtgtcatttctaaaaaaaaaaaaaaa

SEQ ID NO: 106 - protein, 858 aa, Homo sapiens
MSVVGLDVGSQSCYIAVARAGGIETIANEFSDRCTPSVISFGSKNRTIGVAAKNQQITHANNTVSNFKRFHGRAFNDPFIQKEKENLSYDLVPLKNGGVGIKVMYMGEEHLFSVEQITAMLLTKLKETAENSLKKPVTDCVISVPSFFTDAERRSVLDAAQIVGLNCLRLMNDMTAVALNYGIYKQDLPSLDEKPRIVVFVDMGHSAFQVSACAFNKGKLKVLGTAFDPFLGGKNFDEKLVEHFCAEFKTKYKLDAKSKIRALLRLYQECEKLKKLMSSNSTDLPLNIECFMNDKDVSGKMNRSQFEELCAELLQKIEVPLYSLLEQTHLKVEDVSAVEIVGGATRIPAVKERIAKFFGKDISTTLNADEAVARGCALQCAILSPAFKVREFSVTDAVPFPISLIWNHDSEDTEGVHEVFSRNHAAPFSKVLTFLRRGPFELEAFYSDPQGVPYPEAKIGRFVVQNVSAQKDGEKSRVKVKVRVNTHGIFTISTASMVEKVPTEENEMSSEADMECLNQRPPENPDTDKNVQQDNSEAGTQPQVQTDAQQTSQSPPSPELTSEENKIPDADKANEKKVDQPPEAKKPKIKVVNVELPIEANLVWQLGKDLLNMYIETEGKMIMQDKLEKERNDAKNAVEEYVYEFRDKLCGPYEKFICEQDHQNFLRLLTETEDWLYEEGEDQAKQAYVDKLEELMKIGTPVKVRFQEAEERPKMFEELGQRLQHYAKIAADFRNKDEKYNHIDESEMKKVEKSVNEVMEWMNNVMNAQAKKSLDQDPVVRAQEIKTKIKELNNTCEPVVTQPKPKIESPKLERTPNGPNIDKKEEDLEDKNNFGAEPPHQNGECYPNEKNSVNMDLD

SEQ ID NO: 107 - DNA, 2500 bp, Homo sapiens
  CDS (132)..(953)
gtcctgagtattgctcttcacgcttcagtcggacaggcctgtattccatgggaaagtccattggccatttttaactggggctatttcttttctcttatggactatatcaggccacagtggtctccaagggcatgatactcaaaggttgtctcctgtatcctttgtgctctcccaggaataagcaaagatgtgccaggctgtggaaaatagcctatggaggattactaaagatagtgactggctccctcttaacattttatgtggttctctgtcttgatggcgggatggtgctcatgaggaagcaagtgccatcaaggttcatgtaccccaaagagtggcagcacctcaccatgttcatcctcctcactcttaatggctgtgtggacttcatgagcaagaatgtgctgcctcagaggtgtgtgggcctagaaaaaggtaccctggtcctgatcatctacgagctcctgctgctgatggtgtcacatgttaaagattcagaaggggtggagctgcacgtttattctctgctcatcttggtggtgttcctgctgttgctggtgttgactgcagagctgtgggctcccaacatgtgtcatctccagctgatggagacctttctgattctgatgatgggctcctggctgatgcaggcaggctttattctatacagacccgtctctggctacccatggcaggacgatgacatcagtgacatcatgtttgtcaccaccttcttctgctggcatgtgatgatcaatgcctcattcctgttgggaatctatggcttctcttccttttggtatcattgtttcagacccagcttgaagctgactgggcccaaagaagctccatattatgcaagcactccaggacccctctacaagttgctacaggaagtggagcagtcagagaaagaggaccaggctctcctccttccaaagagctccccctgagacagggcctacagtggctggcacatcgtccacctcatcttcctcctgttggctcctcagccacgagcatggtaccctccttggtaaaggtaatggccttgaaggctagcagttggtcccgtctgctggttcattttcttttcttctcttttctttttttttttttttgagacagagtctcgctctgttgcccagcctggagtgcaatggcacaatctcagctcagtgcaacctccgcctcccgagttcaagcgattctcctgcctcagcctcccgagtagctgcaattacaggagcctgccaccatgcccgtgctggtgcattttctgtccctgagcctctaattactgagaagataaggggagagggattgagaaagagacgctgatgggatttgcgggagggagggaaaaggacgaggagaacacttcttcttagtgtgcaagaaaagccactgggggaagagaatgcaacaaaaggaagagctgtgaagggaggagaacagagtctagcagttatgctgtcattagcgtcatcaggcacaagggattgccttttacctgagggaataaagacttctcacaactcaaaactggacccattcaaatctcatcttgataaagaaaagtgggtactttacgtgctcaccaaagtggtgccaccatgtggaaatagcatgatagaatttataattaattcatacaggctgaaattatgctcgctttgcctccttctctctccgcagctttcaagaattggcttcatttcaaactttacatataaagtgagactttttaaatacttaataacatttcaaatttccataatttaaatttgtatagaattcaactgctatagcatttttatagcattcaaatgcttggtacttccctgacttctcattttattactcttattctagcccaaactttccttttcaccatgaccacccttgcacatgcaatttagcagataccattcttgggtctttgcaaatttcttttccttgcaaatcacagccagtcatcctacagtcacatatttaccatgttattcgattcccagaataaacctacatccacccccacaccgcaccaagtatccccaaggtggccttctccagaactcttactgattcccttgttttggaactcttgggcacttacattaaatctgctttgttagtttgctcatacaggtgacccactttcttttatactgctgctgaaatcattttctttcagaaggttcttcctcacccactaaagtacaggctcctaaagggaaaagactttgccttatccaagttaccaaatttcctatgtatactccagctatggatcatggttatgtttaataaagccttctttgcttccagagtcttccctaatcctgtttcttctaaatgtattgctggacaggttggaggttttgtgaatctctctgggtgacaacaacagtcctgaacactgagtcactgccttagtaatgcacccactctcttccttgttttggggtataataaaatccagtaacttgtttctgaa

SEQ ID NO: 108 - protein, 273 aa, Homo sapiens
MILKGCLLYPLCSPRNKQRCARLWKIAYGGLLKIVTGSLLTFYVVLCLDGGMVLMRKQVPSRFMYPKEWQHLTMFILLTLNGCVDFMSKNVLPQRCVGLEKGTLVLIIYELLLLMVSHVKDSEGVELHVYSLLILVVFLLLLVLTAELWAPNMCHLQLMETFLILMMGSWLMQAGFILYRPVSGYPWQDDDISDIMFVTTFFCWHVMINASFLLGIYGFSSFWYHCFRPSLKLTGPKEAPYYASTPGPLYKLLQEVEQSEKEDQALLLPKSSP

SEQ ID NO: 109 - DNA, 802 bp, Homo sapiens
  CDS (253)..(696)
gctggccgtgggagaggcttaaaacaaacgccggaagcaactcccagccccataaagatctgtgaccggcagccccagacctgcctgccttcctgacttctgttccagagcaaaggtcattcagccgcttgaatcagccttttccccccacccggtccccaactttgtttacccgataaggaaggtcagcattcaaagtcaagaagcgccatttatcttcccgtgcgctctacaaatagttccgtgagaaagatggccgggaactcgatcctgctggctgctgtctctattctctcggcctgtcagcaaagttattttgctttgcaagttggaaaggcaagattaaaatacaaagttacgcccccagcagtcactgggtcaccagagtttgagagagtatttcgggcacaacaaaactgtgtggagttttatcctatattcataattacattgtggatggctgggtggtatttcaaccaagtttttgctacttgtctgggtctggtgtacatatatggccgtcacctatacttctggggatattcagaagctgctaaaaaacggatcaccggtttccgactgagtctggggattttggccttgttgaccctcctaggtgccctgggaattgcaaacagctttctggatgaatatctggacctcaatattgccaagaaactgaggcggcaattctaactttttctcttccctttaatgcttgcagaagctgttcccaccatgaaggtaatatggtatcatttgttaaataaaaataaagtctttattctgtttttcttgaaaa

SEQ ID NO: 110 - protein, 147 aa, Homo sapiens
MAGNSILLAAVSILSACQQSYFALQVGKARLKYKVTPPAVTGSPEFERVFRAQQNCVEFYPIFIITLWMAGWYFNQVFATCLGLVYIYGRHLYFWGYSEAAKKRITGFRLSLGILALLTLLGALGIANSFLDEYLDLNIAKKLRRQF

SEQ ID NO: 111 - DNA, 10636 bp, Homo sapiens
  CDS (972)..(3419)
gaggagagagcagagtataccgcagacatcatttctactacagtggcggagccgtacaggacctgtttcactgcagggggatccaaaacaagccccgtggagcagcagccagagcaacagcagccgcaagacattgtttctctccctctgcccccccttccccacgcaaccccagatccatttacactttacagttttacctcacaaaaactactacaagcaccaagctccctgatggaaaggagcatcgtgcatcaagtcaccagggtggtccattcaagctgcagatttgtttgtcatccttgtacagcaatctcctcctccactgccactacagggaagtgcatcacatgtcagcatactggagcatagtgaaagagtctattttgaagcttcaaacttagtgctgctgcagaccaggaacaagagagaaagagtggatttcagcctgcacggatggtcttgaaacacaaatggtttttggtctaggcgttttacactgagattctccactgccaccctttctactcaagcaaaatcttcgtgaaaagatctgctgcaaggaactgatagcttatggttctccattgtgatgaaagcacatggtacagttttccaaagaaattagaccattttcttcgtgagaaagaaatcgacgtgctgttttcatagggtatttctcacttctctgtgaaaggaagaaagaacacgcctgagcccaagagccctcaggagccctccagagcctgtgggaagtctccatggtgaagtataggctgaggctacctgtgaacagtacgcagtgaatgttcatccagagctgctgttggcggattgtacccacggggagatgattcctcatgaagagcctggatcccctacagaaatcaaatgtgactttccgtttatcagactaaaatcagagccatccagacagtgaaacagtcaccgtggaggggggacggcgaaaaatgaaatccaaccaagagcggagcaacgaatgcctgcctcccaagaagcgcgagatccccgccaccagccggtcctccgaggagaaggcccctaccctgcccagcgacaaccaccgggtggagggcacagcatggctcccgggcaaccctggtggccggggccacgggggcgggaggcatgggccggcagggacctcggtggagcttggtttacaacagggaataggtttacacaaagcattgtccacagggctggactactccccgcccagcgctcccaggtctgtccccgtggccaccacgctgcctgccgcgtacgccaccccgcagccagggaccccggtgtcccccgtgcagtacgctcacctgccgcacaccttccagttcattgggtcctcccaatacagtggaacctatgccagcttcatcccatcacagctgatccccccaaccgccaaccccgtcaccagtgcagtggcctcggccgcaggggccaccactccatcccagcgctcccagctggaggcctattccactctgctggccaacatgggcagtctgagccagacgccgggacacaaggctgagcagcagcagcagcagcagcagcagcagcagcagcagcatcagcatcagcagcagcagcagcagcagcagcagcagcagcagcagcagcacctcagcagggctccggggctcatcaccccggggtcccccccaccagcccagcagaaccagtacgtccacatttccagttctccgcagaacaccggccgcaccgcctctcctccggccatccccgtccacctccacccccaccagacgatgatcccacacacgctcaccctggggcccccctcccaggtcgtcatgcaatacgccgactccggcagccactttgtccctcgggaggccaccaagaaagctgagagcagccggctgcagcaggccatccaggccaaggaggtcctgaacggtgagatggagaagagccggcggtacggggccccgtcctcagccgacctgggcctgggcaaggcaggcggcaagtcggttcctcacccgtacgagtccaggcacgtggtggtccacccgagcccctcagactacagcagtcgtgatccttcgggggtccgggcctctgtgatggtcctgcccaacagcaacacgcccgcagctgacctggaggtgcaacaggccactcatcgtgaagcctccccttctaccctcaacgacaaaagtggcctgcatttagggaagcctggccaccggtcctacgcgctctcaccccacacggtcattcagaccacacacagtgcttcagagccactcccggtgggactgccagccacggccttctacgcagggactcaaccccctgtcatcggctacctgagcggccagcagcaagcaatcacctacgccggcagcctgccccagcacctggtgatccccggcacacagcccctgctcatcccggtcggcagcactgacatggaagcgtcgggggcagccccggccatagtcacgtcatccccccagtttgctgcagtgcctcacacgttcgtcaccaccgcccttcccaagagcgagaacttcaaccctgaggccctggtcacccaggccgcctacccagccatggtgcaggcccagatccacctgcctgtggtgcagtccgtggcctccccggcggcggctccccctacgctgcctccctacttcatgaaaggctccatcatccagttggccaacggggagctaaagaaggtggaagacttaaaaacagaagatttcatccagagtgcagagataagcaacgacctgaagatcgactccagcaccgtagagaggattgaagacagccatagcccgggcgtggccgtgatacagttcgccgtcggggagcaccgagcccaggtcagcgttgaagttttggtagagtatcctttttttgtgtttggacagggctggtcatcctgctgtccggagagaaccagccagctctttgatttgccgtgttccaaactctcagttggggatgtctgcatctcgcttaccctcaagaacctgaagaacggctctgttaaaaagggccagcccgtggatcccgccagcgtcctgctgaagcactcaaaggccgacggcctggcgggcagcagacacaggtatgccgagcaggaaaacggaatcaaccaggggagtgcccagatgctctctgagaatggcgaactgaagtttccagagaaaatgggattgcctgcagcgcccttcctcaccaaaatagaacccagcaagcccgcggcaacgaggaagaggaggtggtcggcgccagagagccgcaaactggagaagtcagaagacgaaccacctttgactcttcctaagccttctctaattcctcaggaggttaagatttgcattgaaggccggtctaatgtaggcaagtagaggcagcgtgggggaaaggaaacgtggctctcccttatcatttgtatccagattactgtactgtaggctaaaataacacagtatttacatgttatcttcttaattttaggtttctgttctaaccttgtcattagagttacagcaggtgtgtcgcaggagactggtgcatatgctttttccacgagtgtctgtcagtgagcgggcgggaggaagggcacagcaggagcggtcagggctccaggcatccccggggaagaaaggaacggggcttcacagtgcctgccttctctagcggcacagaagcagccgggggcgctgactcccgctagtgtcaggagaaaagtcccgtgggaagggtcctgcaggggtgcagggttgcacgcatgtgggggtgcacaggcgctgtggcggcgagtgagggtctctttttctctgcctccctctgcctcactctcttgctatcggcatgggccgggggggttcagagcagtgtcctcctggggttcccacgtgcaaaatcaacatcaggaacccagcttcagggcatcgcggagacgcgtcagatggcagatttggaaagttaaccatttaaaagaacatttttctctccaacatattttacaataaaagcaacttttaattgtatagatatatatttccccctatggggcctgactgcactgatatatattttttttaaagagcaactgccacatgcgggatttcatttctgctttttactagtgcagcgatgtcaccagggtgttgtggtggacagggaagcccctgctgtcatggccccacatggggtaaggggggttgggggtgggggagagggagagagcgaacacccacgctggtttctgtgcagtgttaggaaaaccaatcaggttattgcattgacttcactcccaagaggtagatgcaaactgcccttcagtgagagcaacagaagctcttcacgttgagtttgcgaaatctttttgtctttgaactctagtactgtttatagttcatgactatggacaactcgggtgccactttttttttttttcagattccagtgtgacatgaggaattagattttgaagatgagcatatattactatctttaagcatttaaaaatactgttcacactttattaccaagcatcttggtctctcattcaacaagtactgtatctcactttaaactctttggggaaaaaacaaaaacaaaaaaaactaagttgctttctttttttcaacactgtaactacatttcagctctgcagaattgctgaagagcaagatattgaaagtttcaatgtggtttaaagggatgaatgtgaattatgaactagtatgtgacaataaatgaccaccaagtactacctgacgggaggcacttttcactttgatgtctgagaatcagttcaaggcatatgcagagttggcagagaaactgagagaaaagggatggagaagagaatactcatttttgtccagtgtttttctttttaagatgaacttttaaagaaccttgcgatttgcacatattgagtttataacttgtgtgatattcctgcagtttttatccaataacattgtgggaaaggtttgggggactgaacgagcataaataaatgtagcaaaatttctttctaacctgcctaaactctaggccattttataaggttatgttcctttgaaaattcattttggtctttttaccacatctgtcacaaaaagccaggtcttagcgggctcttagaaactctgagaattttcttcagattcattgagagagttttccataaagacatttatatatgtgagcaagattttttttaaacaattactttattattgttgttattaatgttattttcagaatggcttttttttttctattcaaaatcaaatcgagatttaatgtttggtacaaacccagaaagggtatttcatagtttttaaacctttcattcccagagatccgaaatatcatttgtgggttttgaatgcatctttaaagtgctttaaaaaaaagttttataagtagggagaaatttttaaatattcttacttggatggctgcaactaaactgaacaaatacctgacttttcttttaccccattgaaaatagtactttcttcgtttcacaaattaaaaaaaaaatctggtatcaacccacattttggctgtctagtattcatttacatttagggttcaccaggactaatgatttttataaaccgttttctggggtgtaccaaaaacatttgaataggtttagaatagctagaatagttccttgactttcctcgaatttcattaccctctcagcatgcttgcagagagctgggtgggctcattcttgcagtcatactgcttatttagtgctgtattttttaaacgtttctgttcagagaacttgcttaatcttccatatattctgctcagggcacttgcaattattaggttttgtttttctttttgttttttagcctttgatggtaagaggaatacgggctgccacatagactttgttctcattaatatcactatttacaactcatgtggactcagaaaaacacacaccaccttttggcttacttcgagtattgaattgactggatccactaaaccaacactaagatgggaaaacacacatggtttggagcaataggaacatcatcataatttttgtggttctatttcaggtataggaattataaaataattggttctttctaaacacttgtcccatttcattctcttgcttttttagcatgtgcaatactttctgtgccaatagagtctgaccagtgtgctatatagttaaagctcattcccttttggctttttccttgtttggttgatcttccccattctggccagagcagggctggagggaaggagccaggagggagagagcctcccacctttcccctgctgcggatgctgagtgctggggcggggagccttcaggagccccgtgcgtctgccgccacgttgcagaaagagccagccaaggagacccgggggaggaaccgcagtgtcccctgtcaccacacggaatagtgaatgtggagtgtggagaggaaggaggcagattcatttctaagacgcactctggagccatgtagcctggagtcaacccattttccacggtcttttctgcaagtgggcaggcccctcctcggggtctgtgtccttgagacttggagccctgcctctgagcctggacgggaagtgtggcctgttgtgtgtgtgcgttctgagcgtgttggccagtggctgtggaggggaccacctgccacccacggtcaccactcccttgtggcagctttctcttcaaataggaagaacgcacagagggcaggagcctcctgtttgcagacgttggcgggccccgaggctcccagagcagcctctgtcaccgcttctgtgtagcaaacattaacgatgacaggggtagaaattcttcggtgccgttcagcttacaaggatcagccatgtgcctctgtactatgtccactttgcaatatttaccgacagccgtcttttgttctttctttcctgttttccatttttaaactagtaacagcaggccttttgcgtttacaatggaacacaatcaccaagaaattagtcagggcgaaaagaaaaaaataatactattaataagaaaccaacaaacaagaacctctctttctagggatttctaaatatataaaatgactgttccttagaatgtttaacttaagaattatttcagtttgtctgggccacactggggcagaggggggagggagggatacagagatggatgccacttacctcagatcttttaaagtggaaatccaaattgaattttcatttggactttcaggataattttctatgttggtcaacttttcgttttccctaactcacccagtttagtttgggatgatttgatttctgttgttgttgatcccatttctaacttggaattgtgagcctctatgttttctgttaggtgagtgtgttgggttttttccccccaccaggaagtggcagcatccctccttctcccctaaagggactctgcggaacctttcacacctctttctcagggacggggcaggtgtgtgtgtggtacactgacgtgtccagaagcagcactttgactgctctggagtagggttgtacaatttcaaggaatgtttggatttcctgcatcttgtggattactccttagataccgcatagattgcaatataatgctgcatgttcaagatgaacagtagctcctagtaatcataaaatccactctttgcacagtttgatctttactgaaatatgttgccaaaatttatttttgttgttgtagctctggattttgttttgttttgttttttaaggaaacgattgacaataccctttaacatctgtgactactaaggaaacctatttctttcatagagagaaaaatctccaatgcttttgaagacactaataccgtgctatttcagatatgggtgaggaagcagagctctcggtaccgaaggccgggcttcttgagctgtgttggttgtcatggctactgtttcatgaaccacaagcagctcaacagactggtctgttgccttctgaaaccctttgcacttcaatttgcaccaggtgaaaacagggccagcagactccatggcccaattcggtttcttcggtggtgatgtgaaaggagagaattacactttttttttttttaagtggcgtggaggcctttgcttccacatttgtttttaacccagaatttctgaaatagagaatttaagaacacatcaagtaataaatatacagagaatatacttttttataaagcacatgcatctgctattgtgttgggttggtttcctctcttttccacggacagtgttgtgtttctggcatagggaaactccaaacaacttgcacacctctactccggagctgagatttcttttacatagatgacctcgcttcaaatacgttaccttactgatgataggatcttttcttgtagcactataccttgtgggaatttttttttaaatgtacacctgatttgagaagctgaagaaaacaaaattttgaagcactcactttgaggagtacaggtaatgttttaaaaaattgcacaaaagaaaaatgaatgtcgaaatgattcattcagtgtttgaaagatatggctctgttgaaacaatgagtttcatactttgtttgtaaaaaaaaaaaagcagagaagggttgaaagttacatgtttttttgtatatagaaatttgtcatgtctaaatgatcagatttgtatggttatggcctggaagaattactacgtaaaaggctcttaaactatacctatgcttattgttatttttgttacatatagccctcgtctgagggaggggaactcggtattctgcgatttgagaatactgttcattcctatgctgaaagtacttctctgagctcccttcttagtctaaactcttaagccattgcaacttctttttcttcagagatgatgtttgacattttcagcacttcctgttcctataaacccaaagaatataatcttgaacacgaagtgtttgtaacaagggatccaggctaccaatcaaacaggactcattatggggacaaaaaaaaaaattatttcaccttctttccccccacacctcatttaaatggggggagtaaaaacatgatttcaatgtaaatgcctcattttattttagttttattttgatttttatttaatataaagaggccagaataaatacggagcatcttctcagaatagtattcctgtccaaaaatcaagccggacagtggaaactggacagctgtggggatattaagcacccccacttacaattcttaaattcagaatctcgtcccctcccttctcgttgaaggcaactgttctggtagctaactttctcctgtgtaatggcgggagggaacaccggcttcagtttttcatgtccccatgacttgcatacaaatggttcaactgtattaaaattaagtgcatttggccaataggtagtatctatacaataacaacaatctctaagaatttccataacttttcttatctgaaaggactcaagtcttccactgcagatacattggaggcttcacccacgttttctttccctttagtttgtttgctgtctggatggccaatgagcctgtctccttttctgtggccaatctgaaggccttcgttggaagtgttgtttacagtaatccttaccaagataacatactgtcctccagaataccaagtattaggtgacactagctcaagctgttgtcttcagagcagttaccaagaagctcggtgcacaggttttctctggttcttacaggaaccacctactctttcagttttctggcccaggagtggggtaaatcctttagttagtgcatttgaacttgatacctgtgcattcagttctgtgaatactgccctttttggcggggtttcctcatctccccagcctgaactgctcaactctaaacccaaattagtgtcagccgaaaggaggtttcaagatagtcctgtcagtatttgtggtgaccttcagattagacagtcttcatttccagccagtggagtcctggctccagagccatctctgagactcgtactactggatgttttaatatcagatcattacccaccatatgcctcccacaggccaagggaaaacagacaccagaacttgggttgagggcactaccagactgacatggccagtacagaggagaactagggaaggaatgatgttttgcaccttattgaaaagaaaattttaagtgcatacataatagttaagagcttttattgtgacaggagaacttttttccatatgcgtgcatactctctgtaattccagtgtaaaatattgtacttgcactagcttttttaaacaaatattaaaaaatggaagaattcatattctattttctaatcgtggtgtgtctatttgtaggatacactcgagtctgtttattgaattttatggtccctttctttgatggtgcttgcaggttttctaggtagaaattatttcattattataataaaacaatgtttgattcaaaatttgaacaaaattgttttaaataaattgtctgtataccagtacaagtttattgtttcagtatactcgtactaataaaataacagtgccaattgca

SEQ ID NO: 112 - protein, 815 aa, Homo sapiens
MKSNQERSNECLPPKKREIPATSRSSEEKAPTLPSDNHRVEGTAWLPGNPGGRGHGGGRHGPAGTSVELGLQQGIGLHKALSTGLDYSPPSAPRSVPVATTLPAAYATPQPGTPVSPVQYAHLPHTFQFIGSSQYSGTYASFIPSQLIPPTANPVTSAVASAAGATTPSQRSQLEAYSTLLANMGSLSQTPGHKAEQQQQQQQQQQQQHQHQQQQQQQQQQQQQQHLSRAPGLITPGSPPPAQQNQYVHISSSPQNTGRTASPPAIPVHLHPHQTMIPHTLTLGPPSQVVMQYADSGSHFVPREATKKAESSRLQQAIQAKEVLNGEMEKSRRYGAPSSADLGLGKAGGKSVPHPYESRHVVVHPSPSDYSSRDPSGVRASVMVLPNSNTPAADLEVQQATHREASPSTLNDKSGLHLGKPGHRSYALSPHTVIQTTHSASEPLPVGLPATAFYAGTQPPVIGYLSGQQQAITYAGSLPQHLVIPGTQPLLIPVGSTDMEASGAAPAIVTSSPQFAAVPHTFVTTALPKSENFNPEALVTQAAYPAMVQAQIHLPVVQSVASPAAAPPTLPPYFMKGSIIQLANGELKKVEDLKTEDFIQSAEISNDLKIDSSTVERIEDSHSPGVAVIQFAVGEHRAQVSVEVLVEYPFFVFGQGWSSCCPERTSQLFDLPCSKLSVGDVCISLTLKNLKNGSVKKGQPVDPASVLLKHSKADGLAGSRHRYAEQENGINQGSAQMLSENGELKFPEKMGLPAAPFLTKIEPSKPAATRKRRWSAPESRKLEKSEDEPPLTLPKPSLIPQEVKICIEGRSNVGK

SEQ ID NO: 113 - DNA, 4683 bp, Homo sapiens
  CDS (330)..(1178)
ctctatggttcggcggctctaagcgctcagctccgcggtcgtcctccaggtctgtgccgcctccttccggtctcggtggcgcggcacgcgcggctctctaggcctccttcagctctgtggtgacggtggccgaggtggagggccggtctgaagagtggcgggactggcttcacttcctccgcggttcctcggagccgcctcgctcctcttcagggactttgctgagaagggctctcgggcgtccagaccccaccgcaaaggtgtttggcgatccgccgagaagttgttggccccaggagcatccctcggggccgaatgcgcagtggacgatgccccttctgacccaacagatccaagacgaggatgatcagtacagccttgtggccagccttgacaacgttaggaatctctccactatcttgaaagctattcatttccgagaacatgccacgtgtttcgcaactaaaaatggtatcaaagtaacagtggaaaatgcaaagtgtgtgcaagcaaatgcttttattcaggctggaatatttcaggagtttaaagttcaggaagagtctgttacttttcgaattaatttaactgtccttttagactgtttatctatttttggatcaagtcctatgccagggactttaactgcacttcgaatgtgttaccaaggttatggttaccctttgatgctgttcctggaagaaggaggagtggtgacagtctgcaaaatcaatacacaggaacctgaggagaccctggactttgatttctgcagcaccaatgttattaataaaattattctgcagtcagaggggctccgtgaagcattttctgaattggatatgacgagtgaagtcctacaaattaccatgtctcctgacaagccttatttcaggttatctacttttggaaatgcaggaagttcccaccttgactatcccaaagattctgatttgatggaagcatttcattgtaatcagacccaagtcaacagatacaagatttccttactgaaaccctctacaaaggcattagtcctatcttgtaaggtatctattcggacagataacagaggcttcctttcattacagtatatgattagaaatgaagatggacaaatatgttttgtggaatattactgctgccctgatgaagaagttcctgaatctgagtcttgagtatgacaattcactgatatttatgtgtacatttatgatagatgaagttcttattctgagtacagtactctttgtcatttcatattggattttctatagagaagaagcacaatggggaagataggagcaaggtcatgtaccctaatagttactatgttttgtaaatccattttgtagagggcatgtaaataaatgttttcctgtagtcatagattattcaggactgtcctttagttctgtcttttgaactcatgggaataattgtgagtcagcgtaacatttcaagagtctaaaggtggccgggtgtggtggctttaatcccagcactttgggaagccgaggtgggcggatcacctgaggtcaggagttcgagaccagcctgaccaacgtggagaaaccccatctctactaaaaatacaaaaaattagccggacgtggtggcacatgcctgtaatgccagctactcgggaggctgaggcaggagaattgcttgaacccgggaggcggaggttgtggtgagctgagatgacgccattgcactccagcctaggcaataagagcaaaactctgcctcaaaaaaaaaaaaaaaaaaagtctaaaggcttaaagtttgatgcagctacctgaaatgatcttttatttatttattattagaaaaagcaaaggcatatgggcattgcttattagtttgaattctagagactagatcttaaagtagtggttctcaaagtgttgtgcccgcaccaacatcagaatggcctgcaaacttgtagcaaactctggggaggaggccagcattctgtattttaacaagcttccctcaggagattctgatgcctgctaaattttgggaaccactgttttaaaggaaactttttttttctttaatagcatttaattgtatgagatgattgcttttacatgtgatttccttgcaaatgttctgaagttgaggcatcaccaaacaagtctgaacaattctttatgtgatttatttttaaagtagaccttttgaagagatctatgaatgggatataaagcaattttcagtgttacaggttttcttcttcttctcaaaactgtttgctgtaagtaactgcaatcagtacttactactttccatttgcttatgagtttcttgacaaatcaaggtgtagaaaaccagttattaagtgattttgtactttcctggtagttgtcactaaaataatttttgtggcatataaatatatttaataaaatgcaaaaattatcttcctgtctagtagaaaaaattacatgagtaaagtgaagcttctgtctttgttactgtaccaggtgacaacagctgagtgtccctccatggacagtcactattggccttttgagtgagacagttctttaggataaaaacctgtcatcccattgcaggattcatttagcctttctggcccttacccactgatgctagtcattgtgaccaccccacctcccccaaataaaagtgtgccaaactattcattgttgagaaccattcaattgtattcaccaaaattggaggatatattggaatgccctaccttaatataggtcacatagcattagagaaaattggtttggagagtattacagcaaagtgtgctgcaaggaggctactccagcacaatggcaggcactgcttcccaggcatatggacaattctgggaggtggccagggtcagcacctgataactagtaagtgtctcaatctcagcatacaaaatttagcagtgactacaaaagaagttggaattttctaaaatgtttgtattcaagaaggaaacaaatgaatttactaaatgttgtcagagtattttttgtttagataaccaccaagaacagaacaaacctaaaagatacttgggaaaatatctaatcagtcaacattctaaggactgttaaatgtgaaatagcatagttattttttgtcttttgttactagtgtgaacaaagaacggcgcctaacatataatgggcatttagtaactctgttagatgaaagactctccaatttcagattttcttttagcatcttattagtcactacttaattctgatgatttagctctaaatttattttgatctcagtttttttatttttatttttggagacaagatcttgctctgttgcccaggctggagtacagttgtaggattacagttcactccagcctcaatctcctaggctcaagcaatcctcccatctcagcttcccaaatagctacgactacaggtgcatgcctccatgccctgctaatttttgtattttttgtagagatggggttttactatgttccctaggctaatcttgaactcctgagctcaagcaatccacccgcctcggcctcccaaagggctgggattacaggcgtgagctatcatgcctggcctaatgtattttttaaaagttgaatctaaaaagaatttaaaacaaatataaatcagctcagtaaggatggatatttttgtacatttaaaactattattttaggccgggagtggtggctcacacctgtaatcccagcattttgggaagccgaggcagggggatcatctgaggtcaggaagttcgagatcagcctggccaacatggtgaaacccctacctctactaaaaatacaaaaattagctgggtgtggtggtgggtgtctgtaatcccagctacttgagaggctgaggcaagagaatcacttgaaactggaaggcgggggttgcagtgagccgagattgcaccattgcactccagcctgggtgacagagcaagactccgtctcaaaaacaaaaaaaattaaaataaaaattattgttttagctgcatgtcttcagctatttagaattcaaagactaatgaattgtttctaagtcaccctaacatcaaggtacttattttataaagaatttcctccttatttgtgttctaattgacccaggaatttttactttaataaaagtttaactttatttcctatggaaaatcactagggggagtgctccctcaggcagagcaggcgacactttggtgccactacaaattgatgtgtagtatatagaagaatacagtcttatatttaaagacttttagttctgtctttttgaagtttatctctctttctagtaaaatggtgcttactgtgaatggataatcttttttttcatttttcatttgttgatttcccattcgatgatgtagtgcttccaccgagaattgatgaaatgcttcaaaataataaaagtatttgttaaattccactttaataaaaataaggcatgtaacacagtcattttaacaggaagccacagggtttctgtggtgttaccaaagtcctagtaaaaattaattaaaattgctaaaagggcagaatgtggcactctcaacagtggggtaggcagtccttcagaacatagagacttccttctttccttccctgtcttcacattgcttgtcccttatccccacctgaaataaaatctattgggtcctgagaaa

SEQ ID NO: 114 - protein, 282 aa, Homo sapiens
MPLLTQQIQDEDDQYSLVASLDNVRNLSTILKAIHFREHATCFATKNGIKVTVENAKCVQANAFIQAGIFQEFKVQEESVTFRINLTVLLDCLSIFGSSPMPGTLTALRMCYQGYGYPLMLFLEEGGVVTVCKINTQEPEETLDFDFCSTNVINKIILQSEGLREAFSELDMTSEVLQITMSPDKPYFRLSTFGNAGSSHLDYPKDSDLMEAFHCNQTQVNRYKISLLKPSTKALVLSCKVSIRTDNRGFLSLQYMIRNEDGQICFVEYYCCPDEEVPESES

SEQ ID NO: 115 - DNA, 1262 bp, Homo sapiens
  CDS (31)..(942)
cgcctctgacgccaccggctgggctccgccatgagttcggcgccggcctcaggctccgtgcgcgcgcgctatcttgtgtacttccagtacgtgggcaccgactttaacggggtcgcggccgtcaggggcactcagcgcgccgtcggggtccagaactacctggaggaggccgccgagcggctgaattccgtggagccggtcaggttcaccatctccagccgcacggacgccggggtccacgccctgagcaacgcggcgcacctggacgtccagcgccgctcaggccggccgcccttcccgcccgaggtcctggccgaggccctcaacacacacctgcggcacccggccatcagggtcctgcgggccttccgagtgcccagcgacttccacgctcgtcacgcagccacgtcccggacctacctgtaccgcctggccactggctgtcaccggcgtgatgagctgccggtgtttgaacgcaacctatgctggactctcccggcagactgcctggatatggtcgccatgcaggaagccgcccagcacctcctcggcacacacgacttcagcgccttccagtccgctggcagcccggtgccgagccccgtgcgaacgctgcgccgggtctccgtttccccaggccaagccagccccttggtcacccccgaggagagcaggaagctgcggttctggaacctggagtttgagagccagtctttcctgtatagacaggtacggaggatgacggctgtgctggtggccgtggggctgggggctttggcacctgcccaggtgaagacgattctggagagccaagatcccctgggcaagcaccagacacgtgtagccccagcccacggcttattcctcaagtcagtgctgtacgggaacctcggtgctgcctcctgcaccctgcaggggccacagttcgggagccacggatgaccctggacactcaagccaaagttaggccacaccaggcccaaccctgtgctggtcaagccagggcagtcacagctgcttggggcccacagcactgctgcctggtctccacagtagcctccctgcccgggtcccagcaccctggatgcccgtctctgtcccaggcgggatggggcacagtgcaggacacagccatgtacaccaagaagagagtaccaagtagtcttttgttcagcttttactggaaactgctgtctaggaccacctgccctaaccaggaataaaggcaagacagcctggaaaaaaaaaaaaaaaaaaaaaaa

SEQ ID NO: 116 - protein, 303 aa, Homo sapiens
MSSAPASGSVRARYLVYFQYVGTDFNGVAAVRGTQRAVGVQNYLEEAAERLNSVEPVRFTISSRTDAGVHALSNAAHLDVQRRSGRPPFPPEVLAEALNTHLRHPAIRVLRAFRVPSDFHARHAATSRTYLYRLATGCHRRDELPVFERNLCWTLPADCLDMVAMQEAAQHLLGTHDFSAFQSAGSPVPSPVRTLRRVSVSPGQASPLVTPEESRKLRFWNLEFESQSFLYRQVRRMTAVLVAVGLGALAPAQVKTILESQDPLGKHQTRVAPAHGLFLKSVLYGNLGAASCTLQGPQFGSHG

SEQ ID NO: 117 - DNA, 2596 bp, Homo sapiens
  CDS (138)..(1163)
gcttcttctgcccggagaggacgtcatttccgccgagtccctgacctgctgctaggatcgcgacgggaactggagcccgaggtccccgcgcggcccgggcctggcgccctgaggggaagagcggcccggcccgagccatgacggacgggatcctagggaaggcagccacaatggagatccctatccacgggaacggcgaagccaggcagcttcctgaagatgatgggctggagcaggacctccagcaggtgatggtgtcaggacccaacctcaatgaaaccagcattgtgtctggtggctatgggggctctggtgatggactcatccccacagggtctggccgccatccatctcacagcaccactccttctggccctggagatgaggtggctcggggcattgctggagaaaagtttgacatcgtcaagaaatggggcatcaacacctataagtgcacaaagcaactgttatcagaacgatttggtcgaggctcacggactgtggacctggagctagagctgcagattgagttgctgcgtgagacgaagcgcaagtatgagagtgtcctgcagctgggccgggcactgacagcccacctctacagcctgctgcagacccagcatgcactgggtgatgcctttgctgacctcagccagaagtccccagagcttcaggaggaatttggctacaatgcagagacacagaaactactatgcaagaatggggaaacgctgctaggagccgtgaacttctttgtctctagcatcaacacattggtcaccaagaccatggaagacacgctcatgactgtgaaacagtatgaggctgccaggctggaatatgatgcctaccgaacagacttagaggagctgagtctaggcccccgggatgcagggacacgtggtcgacttgagagtgcccaggccactttccaggcccatcgggacaagtatgagaagctgcggggagatgtggccatcaagctcaagttcctggaagaaaacaagatcaaggtgatgcacaagcagctgctgctcttccacaatgctgtgtccgcctactttgctgggaaccagaaacagctggagcagaccctgcagcagttcaacatcaagctgcggcctccaggagctgagaaaccctcctggctagaggagcagtgagctgctcccagcccaacttggctatcaagaaagacattgggaagggcagccccagggtgtgggagattggacatggtacatcctttgtcacttgccctctggcttgggctcctttttctggctggggcctgacaccagttttgcccacattgctatggtgggaagagggcctggaggcccagaagttgctgccctgtctatcttcctggccacagggcttcattcccagatcttttccttccacttcacagccaacggctatgacaaaaccactccctggccaatggcatcactcttcaggctggggtgtgctccctgaccaatgacagagcctgaaaatgccctgtcagccaatggcagctcttctcggactcccctgggccaatgatgttgcgtctaataccctttgtctctcctctatgcgtgcccattgcagagaaggggactgggaccaaaggggtggggataatggggagccccattgctggccttgcatctgaataggcctaccctcacccacccacccagtttaattgtgcttagagcccaagaagattgggatctagcactaggaataaacctttcataaaagcaggcccagcgaggtcaatttgtcggggactctaggagggtggcctgggtggagacaagctcagtctaatcaaacaccagaaccctatcaagtcaaaagagctggggccaggcagctgaagtcacaggtttcagagatggtttgaaggcccagtcttctctcccagcctcagttggagccaaagctttgtcctttagccagcaccaagatagctatggatcttaagagcaccagatccagagggggttgggtttgctgaccttcatcatgcattcattcatacagcaaatatttactgagtgctttcatttgccagggactgcgttaggccctggggaaacatcagtgaataaaacacggtccctgcccacagtgcttagggcctactgagggaaagaagtaaccaggcaactacaaaacagtgataagtattaggatacagaagtacagagggcgctgtgggagcacaaaggaggggcatctggcatggactggggtggaaatggggatgtcagtttgaaagctgagacctggccaggtgcggtggctcactcctgtaatcccagcactttgggaggccgaggcgggcggatcaccaggtcaggagatcaagaccatcctggctaacacggtgaaaacccatctctactaaaaatgcaagaaaattagcccggcacggtggctggcgcctgtagtcctgtagtcccagctactcgggaggctgaggcaggagaatggtgtgaacccgggaggcggagcttgcagtggagccaagattgcgccactgcactccagcctgggcaacagagcgggactccatctcaaaaaaaaaaaaaaaaaa

SEQ ID NO: 118 - protein, 341 aa, Homo sapiens
MTDGILGKAATMEIPIHGNGEARQLPEDDGLEQDLQQVMVSGPNLNETSIVSGGYGGSGDGLIPTGSGRHPSHSTTPSGPGDEVARGIAGEKFDIVKKWGINTYKCTKQLLSERFGRGSRTVDLELELQIELLRETKRKYESVLQLGRALTAHLYSLLQTQHALGDAFADLSQKSPELQEEFGYNAETQKLLCKNGETLLGAVNFFVSSINTLVTKTMEDTLMTVKQYEAARLEYDAYRTDLEELSLGPRDAGTRGRLESAQATFQAHRDKYEKLRGDVAIKLKFLEENKIKVMHKQLLLFHNAVSAYFAGNQKQLEQTLQQFNIKLRPPGAEKPSWLEEQ

SEQ ID NO: 119 - DNA, 2330 bp, Homo sapiens
  CDS (30)..(794)
aaaggaccgaggcgtgcagcggacagcagatggatcccgcggccagcagctgcatgaggagcctccagcccccagcccctgtctggggctgccttcgaaacccccactcggaaggcaatggggcctcagggctaccccactacccgcccaccccgttctccttccaccagaaaccagacttcctggcgacagcgacggcagcgtaccctgacttctcagcctcctgcctggcagccaccccacacagcctgccccaggaggagcacatcttcactgagcagcaccccgctttcccacagtcccccaactggcacttccctgtctcagacgcccggcgcaggcccaactcaggcccggcagggggttccaaggaaatggggaccagcagcctgggcctggtggacaccacaggaggcccaggcgatgactacggggtgcttgggagcactgccaatgagacagagaagaaatcatccaggcggagaaaggagagttcagacaaccaggagaacagagggaagccggagggcagcagcaaagcccgcaaggagaggacggccttcaccaaggagcagctgcgagagctggaggcagagtttgcccatcataactacctgactcggctccgcagatatgagattgcggtaaacctggacctctctgagcgccaggtcaaagtgtggttccagaaccgaaggatgaagtggaagcgtgtgaagggaggtcagcccatctcccccaatgggcaggaccctgaggatggggactccacagcctctccaagttcagagtgagattctgcatggaggaaaaatgactaaggactgagccccctacccaactacccccaccccaatcccaccttcaccctcttccttccccagccagggcagcctctccacatctttccctgactcttggatatgaaactgcccagcattcctgggagtcttaggattttctaggaagttctgtccagcctcttagcagcctcttccctagggcctttgctcccacactctcatggaatcagacagagatcctaccgggccggatgaatctggaaacagcttcagagatactgcttctcagcgtctcttggctgccacccatgcctcctcctaccgctgttctcctaggtcagccaggcctcctcctggtctggacaccacctggcctggtgggagaggagctttggaaccagctggcgactcggaaagtaaatgcttcaaaaggaaggaaatgacagagacacacgcccttgcccaccttcctctgtaggctgcacatctgaggctttggggccccttagttgtcccgaaaccccaagaaaaatcagaatgaggagagtcaaggacagcaactcagctgctgcaagccagaaacacatccctgtctccaaatttgttggctaagtggagacacttctgagaactgactagagaagacagaaaaatagcccgatgtaggtttcggtgtccccatataggcccgtccacacaggcttgactgggtggacaagaatgaacccatgacagcacctgctgcttcaaaatcaaaatcaatttagggatacagcaggggctgttgggctgtgctccagagaaaaggagcagctactccttttaaatccacgatttctggattgaaaacctgtccagatgctgagttgttgggctgaacaactaggagctgaaaacaacgtagaggctggaaagtgtcccctgcattctggaggggaggggagataataaggagggctgctgggtgagggcctggagatgtggaaccctggagtggaaggttctccagtgacagtgtcctgtgactgcaaaaggggacaagaaaatccctcttcctccatgggatggatttaagctcttgctgtgtgttctacaaatgctgttattgtgggaggaaatgctaggtttttgtgtgtggactgcccagacctcagccaggtcttctggagatgacatttgaggactgatggccaaagagcatgggggactgaagccctggctgcctcagcgctctgtctcccaacaccagctggtgttgcagagggaggtcaacgtgagtttggatctcttgtacgcagatgtaatcattcacatgtaaaaataaccccacctccccaccccaaaaagggcaagagctgtggaaaatgattgccaaatgagatggctggttagagcatgattttttctaaagcatacttcatatattttcttaagattacatcaagctaattgtgcgagctcaattcactttgtaagaaaactctcggagaaataaaatcaataaaaagcaaaaaaaaaaaaaaaaaa

SEQ ID NO: 120 - protein, 254 aa, Homo sapiens
MDPAASSCMRSLQPPAPVWGCLRNPHSEGNGASGLPHYPPTPFSFHQKPDFLATATAAYPDFSASCLAATPHSLPQEEHIFTEQHPAFPQSPNWHFPVSDARRRPNSGPAGGSKEMGTSSLGLVDTTGGPGDDYGVLGSTANETEKKSSRRRKESSDNQENRGKPEGSSKARKERTAFTKEQLRELEAEFAHHNYLTRLRRYEIAVNLDLSERQVKVWFQNRRMKWKRVKGGQPISPNGQDPEDGDSTASPSSE

SEQ ID NO: 121 - DNA, 2033 bp, Homo sapiens
  CDS (156)..(719)
aagccgcagattcccatccagtatcctagaggaggagacccagggctgtgtcctaggaggcccaggaagcctggtcagcctggaggccgagggcgggcccgggagatctgggaaggacatcagtgtctccacgaagagcagcagggtctcagcccatggcagccgcaggccccatgactggggccgcagcctccagagccgccacagcagcccattgttctggggggtcaaaggtggaggctgtcagaggggcagtgcagggggctgctggggtgaagccccctgtagcagcagcacccagcctgctgtggctctgccctcctggaccccctgtcctcctggaccccctgccctcctggaccctctgccctcctggacccccttccctcctgggccctcctggaccccctgccctcctggatcctctgtcctcctggaccccctgccctcctggaccccctgtctgtggcccctgctcctctcctccttccccgacacatgactggaccccccgatctgcagccggggtctgggcactgggggtcctgtgggcctctcggtgtctggggacaatcacaggttcccgtgcccacacccagcctctgcttccagaacacactagagggtcccggcatcctgatgagtccactgtccccgcgatggttttcagggatggagaaggctccctgtcctccgctggaaccctgcagccgggctgacggtacccccaccacccacccaggggccccagaccctccccatctccaccgccaacccaggccccggctgcgcacgcggggccaggccgtgagctgctgtccccggatggggccgccccgggctggcctggctcactccgtgtcacagatattcccacagagaccccagcgagacctgcagaacattacagcagaatgaaggagagccagaggaagaggcagatgtgctggcctgtaaacagtctgatttccaatgtaaaccagattcaggcccacgacatcaggtaaacatctgcatcagagcccccggccccccaccgcccgggaggccccggggtccacacggccgactctgggacccgtcacagtgaccgccgagacatttcgtaattaggcaaaattgatccttgcattccttccctaaatcccaaatctctgcaattttacttcttctcaaaaatgaaaacatttggcaattagctgatccaagtgaaaaaggtagagaatgtgctctcaactggaaaatgccaattaaggaagcagctctgacttcccacccgccctggctaagctgggagcttatcttccccgagaagaatctgctgggataagggggcttgggaaacaccgagggcagggctgcctcctcagcttcctttgagagcagattagccgtggccttgtgccagcagggcctgggtgccacacagggtggcaggggtggcagagccgggcccggctctggtactgggatttggggtggcgggacccagtggggcacccgcttgtgggcggcactgagggcggtgacgtaggcagcgggtgccggtgtctgcccctccatctggccgggctccccaccctgctcctgcagccctggacctcagggcccatttgcggtgcaaggcggctcttggccattttgcccgcagggccctaccttgggtcttgggagcttctgtcccttgccctctcttgtccaggtcagcatctcccactgtgggaatcctatgtggccccatcgtctggacagtgtgggtcaggtcactgtggctgttttgtgatgcgtgtgtgggctcatccctcagtgctcagaagctgcagacactatggaaccgcttttcaggccccgtggccgtcacccccgctctagagacttgattgcagggaccatgcccggccggcctaactgcacccctcactccaggtgggtggggggacccaggcctgctggcccctgtggtggtgcagcccagaaggtgtgaatcagtttacactgttcagtgcctgaataaaagtcacaggacaaagagg

SEQ ID NO: 122 - protein, 187 aa, Homo sapiens
MAAAGPMTGAAASRAATAAHCSGGSKVEAVRGAVQGAAGVKPPVAAAPSLLWLCPPGPPVLLDPLPSWTLCPPGPPSLLGPPGPPALLDPLSSWTPCPPGPPVCGPCSSPPSPTHDWTPRSAAGVWALGVLWASRCLGTITGSRAHTQPLLPEHTRGSRHPDESTVPAMVFRDGEGSLSSAGTLQPG

SEQ ID NO: 123 - DNA, 810 bp, Homo sapiens
  CDS (6)..(401)
ccaccatggacccccgtctgcccgcctgggcgctggtgctgctgggccctgccctggtgttcgcgttgggccccgcgcccaccccagagatgcgtgagaagttgtgcggccaccacttcgtacgcgcgctagtgcgcgtgtgcgggggcccccgctggtccaccgaagccaggaggcctgcgaccggaggcgaccgtgagttgctacagtggctggagagacgacatctgctccatgggctggtggccgacagtaatctcacgctgggacctggcctgcagcccctgccccagacctctcaccatcaccgccaccaccgtgcagctgccaccaaccctgcacgctactgctgcctcagtggctgtacccaacaagacctgctgaccctctgtccctactgattcctccttgggtgcagcctcagagtggcctgaggcccagagggtctggtctggtgagctcctgaggccacacagcaccataaagtctcgcatctacaggcctttgattacctcctgggatgggtgctcactatctaccccagaccaatgccacctgcagcctgtggagtcaactgcagaataaatcacaccctagccctggcttggaggatccccgctttcacagatgctggacactgacagccaaatgtcctcactccaggggagccccagacgctccgctccctgcatgtgtaacaccccttcttgctgtctcttagtaaataaacgacccaaagcagaaaaaaaaaaaaaaaaaaaaaaaaaaaaaaaaaaaaaaaaaaaaaaaaaaaaaaaaaaaaaaaaaaaa

SEQ ID NO: 124 - protein, 131 aa, Homo sapiens
MDPRLPAWALVLLGPALVFALGPAPTPEMREKLCGHHFVRALVRVCGGPRWSTEARRPATGGDRELLQWLERRHLLHGLVADSNLTLGPGLQPLPQTSHHHRHHRAAATNPARYCCLSGCTQQDLLTLCPY

SEQ ID NO: 125 - DNA, 1624 bp, Homo sapiens
  CDS (166)..(1128)
gttgcttggatcagtctaggtgcagctgccggatccttcagcgtctgcatctcggcgtcgccccgcgtaccgtcgcccggctctccgccgctctcccggggtttcggggcacttgggtcccacagtctggtcctgcttcaccttcccctgacctgagtagtcgccatggcacaggttctcagaggcactgtgactgacttccctggatttgatgagcgggctgatgcagaaactcttcggaaggctatgaaaggcttgggcacagatgaggagagcatcctgactctgttgacatcccgaagtaatgctcagcgccaggaaatctctgcagcttttaagactctgtttggcagggatcttctggatgacctgaaatcagaactaactggaaaatttgaaaaattaattgtggctctgatgaaaccctctcggctttatgatgcttatgaactgaaacatgccttgaagggagctggaacaaatgaaaaagtactgacagaaattattgcttcaaggacacctgaagaactgagagccatcaaacaagtttatgaagaagaatatggctcaagcctggaagatgacgtggtgggggacacttcagggtactaccagcggatgttggtggttctccttcaggctaacagagaccctgatgctggaattgatgaagctcaagttgaacaagatgctcaggctttatttcaggctggagaacttaaatgggggacagatgaagaaaagtttatcaccatctttggaacacgaagtgtgtctcatttgagaaaggtgtttgacaagtacatgactatatcaggatttcaaattgaggaaaccattgaccgcgagacttctggcaatttagagcaactactccttgctgttgtgaaatctattcgaagtatacctgcctaccttgcagagaccctctattatgctatgaagggagctgggacagatgatcataccctcatcagagtcatggtttccaggagtgagattgatctgtttaacatcaggaaggagtttaggaagaattttgccacctctctttattccatgattaagggagatacatctggggactataagaaagctcttctgctgctctgtggagaagatgactaacgtgtcacggggaagagctccctgctgtgtgcctgcaccaccccactgccttccttcagcacctttagctgcatttgtatgccagtgcttaacacattgccttattcatactagcatgctcatgaccaacacatacacgtcatagaagaaaatagtggtgcttctttctgatctctagtggagatctctttgactgctgtagtactaaagtgtacttaatgttactaagtttaatgcctggccattttccatttatatatattttttaagaggctagagtgcttttagccttttttaaaaactccatttatattacatttgtaaccatgatactttaatcagaagcttagccttgaaattgtgaactcttggaaatgttattagtgaagttcgcaactaaactaaacctgtaaaattatgatgattgtattcaaaagattaatgaaaaataaacatttctgtccccctgaaaaaaaaaaaaaaaaaaaaaaaaaaa

SEQ ID NO: 126 - protein, 320 aa, Homo sapiens
MAQVLRGTVTDFPGFDERADAETLRKAMKGLGTDEESILTLLTSRSNAQRQEISAAFKTLFGRDLLDDLKSELTGKFEKLIVALMKPSRLYDAYELKHALKGAGTNEKVLTEIIASRTPEELRAIKQVYEEEYGSSLEDDVVGDTSGYYQRMLVVLLQANRDPDAGIDEAQVEQDAQALFQAGELKWGTDEEKFITIFGTRSVSHLRKVFDKYMTISGFQIEETIDRETSGNLEQLLLAVVKSIRSIPAYLAETLYYAMKGAGTDDHTLIRVMVSRSEIDLFNIRKEFRKNFATSLYSMIKGDTSGDYKKALLLLCGEDD

SEQ ID NO: 127 - DNA, 2608 bp, Homo sapiens
  CDS (55)..(1656)
tccttcttcattctgcagttggtgccagaactctggatcctgaactggaagaaaatgtctatccaggttgagcatcctgctggtggttacaagaaactgtttgaaactgtggaggaactgtcctcgccgctcacagctcatgtaacaggcaggatccccctctggctcaccggcagtctccttcgatgtgggccaggactctttgaagttggatctgagccattttaccacctgtttgatgggcaagccctcctgcacaagtttgactttaaagaaggacatgtcacataccacagaaggttcatccgcactgatgcttacgtacgggcaatgactgagaaaaggatcgtcataacagaatttggcacctgtgctttcccagatccctgcaagaatatattttccaggtttttttcttactttcgaggagtagaggttactgacaatgcccttgttaatgtctacccagtgggggaagattactacgcttgcacagagaccaactttattacaaagattaatccagagaccttggagacaattaagcaggttgatctttgcaactatgtctctgtcaatggggccactgctcacccccacattgaaaatgatggaaccgtttacaatattggtaattgctttggaaaaaatttttcaattgcctacaacattgtaaagatcccaccactgcaagcagacaaggaagatccaataagcaagtcagagatcgttgtacaattcccctgcagtgaccgattcaagccatcttacgttcatagttttggtctgactcccaactatatcgtttttgtggagacaccagtcaaaattaacctgttcaagttcctttcttcatggagtctttggggagccaactacatggattgttttgagtccaatgaaaccatgggggtttggcttcatattgctgacaaaaaaaggaaaaagtacctcaataataaatacagaacttctcctttcaacctcttccatcacatcaacacctatgaagacaatgggtttctgattgtggatctctgctgctggaaaggatttgagtttgtttataattacttatatttagccaatttacgtgagaactgggaagaggtgaaaaaaaatgccagaaaggctccccaacctgaagttaggagatatgtacttcctttgaatattgacaaggctgacacaggcaagaatttagtcacgctccccaatacaactgccactgcaattctgtgcagtgacgagactatctggctggagcctgaagttctcttttcagggcctcgtcaagcatttgagtttcctcaaatcaattaccagaagtattgtgggaaaccttacacatatgcgtatggacttggcttgaatcactttgttccagataggctctgtaagctgaatgtcaaaactaaagaaacttgggtttggcaagagcctgattcatacccatcagaacccatctttgtttctcacccagatgccttggaagaagatgatggtgtagttctgagtgtggtggtgagcccaggagcaggacaaaagcctgcttatctcctgattctgaatgccaaggacttaagtgaagttgcccgggctgaagtggagattaacatccctgtcacctttcatggactgttcaaaaaatcttgagcatactccagcaagatatgtttttggtagcaaaactgagaaaatcagcttcaggtctgcaatcaaattctgttcaattttagcctgctatatgtcatggttttaacttgcagatgcgcacaattttgcaatgttttacagaaagcactgagttgagcaagcaattcctttatttaaaaaaaaaagtacgtatttagataatcatacttcctctgtgagacaggccataactgaaaaactcttaaatatttagcaatcaaataggaaatgaatgtggacttactaaatggcttttaattcctattataagagcatattttaggtacctatctgctccaattatatttttaacatttaaaaaccaaagtcctctacacttgatttatattatatgtggctttgctgagtcaaggaagtatcatgcaataaggcttaattactaaatgtcaaaccaaactttttctcaaaccagggactatcatctaagattaattacagtaattattttgcgtatacgtaactgctcaaagattatgaatcttatgaatgttaacctttccgtttattacaagcaagtactattatttctgattttataataagaaaatctgtgtttaatcaactgaggcctctcaaccaaataacatctcagagattaagttatatattaaaagcttatgtaacataaaagcaagtacatatagtagtgactatatttaaaaaaacagcataaaatgcttaaaaatgtaatatttactaaaatcagattatgggataatgttgcaggattatactttattgcatcttttttgtttaattgtatttaagcattgtgcaatcacttgggaaaaatattaaattattaacattgaggtattaatacattttaagccttttgtttttaaatttcttttcttccagagattgtttaaaaataaatattgacaaaaat

SEQ ID NO: 128 - protein, 533 aa, Homo sapiens
MSIQVEHPAGGYKKLFETVEELSSPLTAHVTGRIPLWLTGSLLRCGPGLFEVGSEPFYHLFDGQALLHKFDFKEGHVTYHRRFIRTDAYVRAMTEKRIVITEFGTCAFPDPCKNIFSRFFSYFRGVEVTDNALVNVYPVGEDYYACTETNFITKINPETLETIKQVDLCNYVSVNGATAHPHIENDGTVYNIGNCFGKNFSIAYNIVKIPPLQADKEDPISKSEIVVQFPCSDRFKPSYVHSFGLTPNYIVFVETPVKINLFKFLSSWSLWGANYMDCFESNETMGVWLHIADKKRKKYLNNKYRTSPFNLFHHINTYEDNGFLIVDLCCWKGFEFVYNYLYLANLRENWEEVKKNARKAPQPEVRRYVLPLNIDKADTGKNLVTLPNTTATAILCSDETIWLEPEVLFSGPRQAFEFPQINYQKYCGKPYTYAYGLGLNHFVPDRLCKLNVKTKETWVWQEPDSYPSEPIFVSHPDALEEDDGVVLSVVVSPGAGQKPAYLLILNAKDLSEVARAEVEINIPVTFHGLFKKS

SEQ ID NO: 129 - DNA, 5988 bp, Homo sapiens
  CDS (517)..(4173)
ctgcccggcgtgctgggtagaggtggccagccccggccgctgctgccagacgggctctccgggtccttctccgagagccgggcgggcacgcgtcattgtgttacctgcggccggcccgcgagctaggctggtttttttttttctcccctccctcccccctttttccatgcagctgatctaaaagggaataaaaggctgcgcataatcataataataaaagaaggggagcgcgagagaaggaaagaaagccgggaggtggaagaggagggggagcgtctcaaagaagcgatcagaataataaaaggaggccgggctctttgccttctggaacgggccgctcttgaaagggcttttgaaaagtggtgttgttttccagtcgtgcatgctccaatcggcggagtatattagagccgggacgcggcggccgcaggggcagcggcgacggcagcaccggcggcagcaccagcgcgaacagcagcggcggcgtcccgagtgcccgcggcgcgcggcgcagcgatgcgttccccacggacgcgcggccggtccgggcgccccctaagcctcctgctcgccctgctctgtgccctgcgagccaaggtgtgtggggcctcgggtcagttcgagttggagatcctgtccatgcagaacgtgaacggggagctgcagaacgggaactgctgcggcggcgcccggaacccgggagaccgcaagtgcacccgcgacgagtgtgacacatacttcaaagtgtgcctcaaggagtatcagtcccgcgtcacggccggggggccctgcagcttcggctcagggtccacgcctgtcatcgggggcaacaccttcaacctcaaggccagccgcggcaacgaccgcaaccgcatcgtgctgcctttcagtttcgcctggccgaggtcctatacgttgcttgtggaggcgtgggattccagtaatgacaccgttcaacctgacagtattattgaaaaggcttctcactcgggcatgatcaaccccagccggcagtggcagacgctgaagcagaacacgggcgttgcccactttgagtatcagatccgcgtgacctgtgatgactactactatggctttggctgcaataagttctgccgccccagagatgacttctttggacactatgcctgtgaccagaatggcaacaaaacttgcatggaaggctggatgggccccgaatgtaacagagctatttgccgacaaggctgcagtcctaagcatgggtcttgcaaactcccaggtgactgcaggtgccagtacggctggcaaggcctgtactgtgataagtgcatcccacacccgggatgcgtccacggcatctgtaatgagccctggcagtgcctctgtgagaccaactggggcggccagctctgtgacaaagatctcaattactgtgggactcatcagccgtgtctcaacgggggaacttgtagcaacacaggccctgacaaatatcagtgttcctgccctgaggggtattcaggacccaactgtgaaattgctgagcacgcctgcctctctgatccctgtcacaacagaggcagctgtaaggagacctccctgggctttgagtgtgagtgttccccaggctggaccggccccacatgctctacaaacattgatgactgttctcctaataactgttcccacgggggcacctgccaggacctggttaacggatttaagtgtgtgtgccccccacagtggactgggaaaacgtgccagttagatgcaaatgaatgtgaggccaaaccttgtgtaaacgccaaatcctgtaagaatctcattgccagctactactgcgactgtcttcccggctggatgggtcagaattgtgacataaatattaatgactgccttggccagtgtcagaatgacgcctcctgtcgggatttggttaatggttatcgctgtatctgtccacctggctatgcaggcgatcactgtgagagagacatcgatgaatgtgccagcaacccctgtttgaatgggggtcactgtcagaatgaaatcaacagattccagtgtctgtgtcccactggtttctctggaaacctctgtcagctggacatcgattattgtgagcctaatccctgccagaacggtgcccagtgctacaaccgtgccagtgactatttctgcaagtgccccgaggactatgagggcaagaactgctcacacctgaaagaccactgccgcacgaccccctgtgaagtgattgacagctgcacagtggccatggcttccaacgacacacctgaaggggtgcggtatatttcctccaacgtctgtggtcctcacgggaagtgcaagagtcagtcgggaggcaaattcacctgtgactgtaacaaaggcttcacgggaacatactgccatgaaaatattaatgactgtgagagcaacccttgtagaaacggtggcacttgcatcgatggtgtcaactcctacaagtgcatctgtagtgacggctgggagggggcctactgtgaaaccaatattaatgactgcagccagaacccctgccacaatgggggcacgtgtcgcgacctggtcaatgacttctactgtgactgtaaaaatgggtggaaaggaaagacctgccactcacgtgacagtcagtgtgatgaggccacgtgcaacaacggtggcacctgctatgatgagggggatgcttttaagtgcatgtgtcctggcggctgggaaggaacaacctgtaacatagcccgaaacagtagctgcctgcccaacccctgccataatgggggcacatgtgtggtcaacggcgagtcctttacgtgcgtctgcaaggaaggctgggaggggcccatctgtgctcagaataccaatgactgcagccctcatccctgttacaacagcggcacctgtgtggatggagacaactggtaccggtgcgaatgtgccccgggttttgctgggcccgactgcagaataaacatcaatgaatgccagtcttcaccttgtgcctttggagcgacctgtgtggatgagatcaatggctaccggtgtgtctgccctccagggcacagtggtgccaagtgccaggaagtttcagggagaccttgcatcaccatggggagtgtgataccagatggggccaaatgggatgatgactgtaatacctgccagtgcctgaatggacggatcgcctgctcaaaggtctggtgtggccctcgaccttgcctgctccacaaagggcacagcgagtgccccagcgggcagagctgcatccccatcctggacgaccagtgcttcgtccacccctgcactggtgtgggcgagtgtcggtcttccagtctccagccggtgaagacaaagtgcacctctgactcctattaccaggataactgtgcgaacatcacatttacctttaacaaggagatgatgtcaccaggtcttactacggagcacatttgcagtgaattgaggaatttgaatattttgaagaatgtttccgctgaatattcaatctacatcgcttgcgagccttccccttcagcgaacaatgaaatacatgtggccatttctgctgaagatatacgggatgatgggaacccgatcaaggaaatcactgacaaaataatcgatcttgttagtaaacgtgatggaaacagctcgctgattgctgccgttgcagaagtaagagttcagaggcggcctctgaagaacagaacagatttccttgttcccttgctgagctctgtcttaactgtggcttggatctgttgcttggtgacggccttctactggtgcctgcggaagcggcggaagccgggcagccacacacactcagcctctgaggacaacaccaccaacaacgtgcgggagcagctgaaccagatcaaaaaccccattgagaaacatggggccaacacggtccccatcaaggattatgagaacaagaactccaaaatgtctaaaataaggacacacaattctgaagtagaagaggacgacatggacaaacaccagcagaaagcccggtttgccaagcagccggcgtacacgctggtagacagagaagagaagccccccaacggcacgccgacaaaacacccaaactggacaaacaaacaggacaacagagacttggaaagtgcccagagcttaaaccgaatggagtacatcgtatagcagaccgcgggcactgccgccgctaggtagagtctgagggcttgtagttctttaaactgtcgtgtcatactcgagtctgaggccgttgctgacttagaatccctgtgttaatttaagttttgacaagctggcttacactggcaatggtagtttctgtggttggctgggaaatcgagtgccgcatctcacagctatgcaaaaagctagtcaacagtaccctggttgtgtgtccccttgcagccgacacggtctcggatcaggctcccaggagcctgcccagccccctggtctttgagctcccacttctgccagatgtcctaatggtgatgcagtcttagatcatagttttatttatatttattgactcttgagttgtttttgtatattggttttatgatgacgtacaagtagttctgtatttgaaagtgcctttgcagctcagaaccacagcaacgatcacaaatgactttattatttattttttttaattgtatttttgttgttgggggaggggagactttgatgtcagcagttgctggtaaaatgaagaatttaaagaaaaaaatgtcaaaagtagaactttgtatagttatgtaaataattcttttttattaatcactgtgtatatttgatttattaacttaataatcaagagccttaaaacatcattcctttttatttatatgtatgtgtttagaattgaaggtttttgatagcattgtaagcgtatggctttatttttttgaactcttctcattacttgttgcctataagccaaaattaaggtgtttgaaaatagtttattttaaaacaataggatgggcttctgtgcccagaatactgatggaatttttttgtacgacgtcagatgtttaaaacaccttctatagcatcacttaaaacacgttttaaggactgactgaggcagtttgaggattagtttagaacaggtttttttgtttgtttgttttttgtttttctgctttagacttgaaaagagacaggcaggtgatctgctgcagagcagtaagggaacaagttgagctatgacttaacatagccaaaatgtgagtggttgaatatgattaaaaatatcaaattaattgtgtgaacttggaagcacaccaatcttactttgtaaattctgatttcttttcaccattcgtacataatactgaaccacttgtagatttgatttttttttttaatctactgcatttagggagtattctaataagctagttgaatacttgaaccataaaatgtccagtaagatcactgtttagatttgccatagagtacactgcctgccttaagtgaggaaatcaaagtgctattacgaagttcaagatcaaaaaggcttataaaacagagtaatcttgttggttcaccattgagaccgtgaagatactttgtattgtcctattagtgttatatgaacatacaaatgcatctttgatgtgttgttcttggcaataaattttgaaaagtaatatttattaaatttttttgtatgaaaacatggaacagtgtggcctcttctgagcttacgtagttctaccggctttgccatgtgcttctgccaccctgctgagtctgttctggtaatcggggtataataggctctgcctgacagagggatggaggaagaactgaaaggcttttcaaccacaaaactcatctggagttctcaaagacctggggctgctgtgaagctggaactgcgggagccccatctaggggagccttgattcccttgttattcaacagcaagtgtgaatactgcttgaataaacaccactggattaatggcca

SEQ ID NO: 130 - protein, 1218 aa, Homo sapiens
MRSPRTRGRSGRPLSLLLALLCALRAKVCGASGQFELEILSMQNVNGELQNGNCCGGARNPGDRKCTRDECDTYFKVCLKEYQSRVTAGGPCSFGSGSTPVIGGNTFNLKASRGNDRNRIVLPFSFAWPRSYTLLVEAWDSSNDTVQPDSIIEKASHSGMINPSRQWQTLKQNTGVAHFEYQIRVTCDDYYYGFGCNKFCRPRDDFFGHYACDQNGNKTCMEGWMGPECNRAICRQGCSPKHGSCKLPGDCRCQYGWQGLYCDKCIPHPGCVHGICNEPWQCLCETNWGGQLCDKDLNYCGTHQPCLNGGTCSNTGPDKYQCSCPEGYSGPNCEIAEHACLSDPCHNRGSCKETSLGFECECSPGWTGPTCSTNIDDCSPNNCSHGGTCQDLVNGFKCVCPPQWTGKTCQLDANECEAKPCVNAKSCKNLIASYYCDCLPGWMGQNCDININDCLGQCQNDASCRDLVNGYRCICPPGYAGDHCERDIDECASNPCLNGGHCQNEINRFQCLCPTGFSGNLCQLDIDYCEPNPCQNGAQCYNRASDYFCKCPEDYEGKNCSHLKDHCRTTPCEVIDSCTVAMASNDTPEGVRYISSNVCGPHGKCKSQSGGKFTCDCNKGFTGTYCHENINDCESNPCRNGGTCIDGVNSYKCICSDGWEGAYCETNINDCSQNPCHNGGTCRDLVNDFYCDCKNGWKGKTCHSRDSQCDEATCNNGGTCYDEGDAFKCMCPGGWEGTTCNIARNSSCLPNPCHNGGTCVVNGESFTCVCKEGWEGPICAQNTNDCSPHPCYNSGTCVDGDNWYRCECAPGFAGPDCRININECQSSPCAFGATCVDEINGYRCVCPPGHSGAKCQEVSGRPCITMGSVIPDGAKWDDDCNTCQCLNGRIACSKVWCGPRPCLLHKGHSECPSGQSCIPILDDQCFVHPCTGVGECRSSSLQPVKTKCTSDSYYQDNCANITFTFNKEMMSPGLTTEHICSELRNLNILKNVSAEYSIYIACEPSPSANNEIHVAISAEDIRDDGNPIKEITDKIIDLVSKRDGNSSLIAAVAEVRVQRRPLKNRTDFLVPLLSSVLTVAWICCLVTAFYWCLRKRRKPGSHTHSASEDNTTNNVREQLNQIKNPIEKHGANTVPIKDYENKNSKMSKIRTHNSEVEEDDMDKHQQKARFAKQPAYTLVDREEKPPNGTPTKHPNWTNKQDNRDLESAQSLNRMEYIV

SEQ ID NO: 131 - DNA, 2136 bp, Homo sapiens
  CDS (100)..(2040)
gtgtgtggaggggaccctgtggttagcagcagctatcgcagcgtcggatgttcagagcagcagaagccggcgtcgtcggatgttgtgttgcccgccaccatgagctacacaggctttgtccagggatctgaaaccactttgcagtcgacatactcggataccagcgctcagcccacctgtgattatggatatggaacttggaactctgggacaaatagaggctacgagggctatggctatggctatggctatggccaggataacaccaccaactatgggtatggtatggccacttcacactcttgggaaatgcctagctctgacacaaatgcaaacactagtgcctcgggtagcgccagtgccgattccgttttatccagaattaaccagcgcttagatatggtgccgcatttggagacagacatgatgcaaggaggcgtgtacggctcaggtggagaaaggtatgactcttatgagtcctgcgactcgagggccgtcctgagtgagcgcgacctgtaccggtcaggctatgactacagcgagcttgaccctgagatggaaatggcctatgagggccaatacgatgcctaccgcgaccagttccgcatgcgtggcaacgacaccttcggtcccagggcacagggctgggcccgggatgcccggagcggccggccaatggcctcaggctatgggcgcatgtgggaagaccccatgggggcccggggccagtgcatgtctggtgcctctcggctgccctccctcttctcccagaacatcatccccgagtacggcatgttccagggcatgcgaggtgggggcgccttcccgggcggctcccgctttggtttcgggtttggcaatggcatgaagcagatgaggcggacctggaagacctggaccacagccgacttccgaaccaagaagaagaagagaaagcagggcggcagtcctgatgagccagatagcaaagccacccgcacggactgctcggacaacagcgactcagacaatgatgagggcaccgagggggaagccacagagggccttgaaggcaccgaggctgtggagaagggctccagagtggacggagaggatgaggagggaaaagaggatgggagagaagaaggcaaagaggatccagagaagggggccctaaccacccaggatgaaaatggccagaccaagcgcaagttgcaggcaggcaagaagagtcaggacaagcagaaaaagcggcagcgagaccgcatggtggaaaggatccagtttgtgtgttctctgtgcaaataccggaccttctatgaggacgagatggccagccatcttgacagcaagttccacaaggaacactttaagtacgtaggcaccaagctccctaagcagacggctgactttctgcaggagtacgtcactaacaagaccaagaagacagaggagctccgaaaaaccgtggaggaccttgatggcctcatccaccaaatctacagagaccaggatctgacccaggaaattgccatggagcattttgtgaagaaggtggaggcagcccattgtgcagcctgcgacctcttcattcccatgcagtttgggatcatccagaagcatctgaagaccatggatcacaaccggaaccgcaggctcatgatggagcagtccaagaagtcctccctcatggtggcccgcagtattctcaacaacaagctcatcagcaagaagctggagcgctacctgaagggcgagaaccctttcaccgacagccccgaggaggagaaggagcaggaggaggctgagggcggtgccctggacgagggggcgcagggcgaagcggcagggatctcggagggcgcagagggcgtgccggcgcagcctcccgtgcccccagagccagcccccggggccgtgtcgccgccaccgccgccgcccccagaggaggaggaggagggcgccgtgcccttgctgggaggggcgctgcaacgccagatccgcggcatcccgggcctcgacgtggaggacgacgaggagggcggcgggggcgccccgtgacccgagctcggggcgggcggagcccgcgtggccgaagctggaaaccaaacctaataaagttttcccatcccaccaaaaaaaaaaaaaaaaaaaaaa

SEQ ID NO: 132 - protein, 646 aa, Homo sapiens
MSYTGFVQGSETTLQSTYSDTSAQPTCDYGYGTWNSGTNRGYEGYGYGYGYGQDNTTNYGYGMATSHSWEMPSSDTNANTSASGSASADSVLSRINQRLDMVPHLETDMMQGGVYGSGGERYDSYESCDSRAVLSERDLYRSGYDYSELDPEMEMAYEGQYDAYRDQFRMRGNDTFGPRAQGWARDARSGRPMASGYGRMWEDPMGARGQCMSGASRLPSLFSQNIIPEYGMFQGMRGGGAFPGGSRFGFGFGNGMKQMRRTWKTWTTADFRTKKKKRKQGGSPDEPDSKATRTDCSDNSDSDNDEGTEGEATEGLEGTEAVEKGSRVDGEDEEGKEDGREEGKEDPEKGALTTQDENGQTKRKLQAGKKSQDKQKKRQRDRMVERIQFVCSLCKYRTFYEDEMASHLDSKFHKEHFKYVGTKLPKQTADFLQEYVTNKTKKTEELRKTVEDLDGLIHQIYRDQDLTQEIAMEHFVKKVEAAHCAACDLFIPMQFGIIQKHLKTMDHNRNRRLMMEQSKKSSLMVARSILNNKLISKKLERYLKGENPFTDSPEEEKEQEEAEGGALDEGAQGEAAGISEGAEGVPAQPPVPPEPAPGAVSPPPPPPPEEEEEGAVPLLGGALQRQIRGIPGLDVEDDEEGGGGAP

SEQ ID NO: 133 - DNA, 562 bp, Homo sapiens
  CDS (109)..(393)
ctggaattgaggctgagccaaagaccccagggccgtctcagtctcataaaaggggatcaggcaggaggagtttgggagaaacctgagaagggcctgatttgcagcatcatgatgggcctctccttggcctctgctgtgctcctggcctccctcctgagtctccaccttggaactgccacacgtgggagtgacatatccaagacctgctgcttccaatacagccacaagccccttccctggacctgggtgcgaagctatgaattcaccagtaacagctgctcccagcgggctgtgatattcactaccaaaagaggcaagaaagtctgtacccatccaaggaaaaaatgggtgcaaaaatacatttctttactgaaaactccgaaacaattgtgactcagctgaattttcatccgaggacgcttggaccccgctcttggctctgcagccctctggggagcctgcggaatcttttctgaaggctacatggacccgctggggaggagagggtgtttcctcccagagttactttaataaaggttgttcatagagttgacttgttcat

SEQ ID NO: 134 - protein, 94 aa, Homo sapiens
MMGLSLASAVLLASLLSLHLGTATRGSDISKTCCFQYSHKPLPWTWVRSYEFTSNSCSQRAVIFTTKRGKKVCTHPRKKWVQKYISLLKTPKQL

SEQ ID NO: 135 - DNA, 4837 bp, Homo sapiens
  CDS (275)..(4525)
gcggctgcgtcagggattccttggtggccctggagggtggataggctggcctgggggccatcaggacagcaggtgacggtcaggccaatgccagccgggcctgggcacagccctgtgggggcttcggagggccctgaggaggaggaggaagaggcagaggagagaaggccccacggaggtcctgtcgccagcgctgccactgcctgacctccgctgcccgaaggccggtgggcctctgtggcctccgtgaagcaggcccggctgtcgtcaggccatgtctggtccatggccctcccccgacagccggaccaagggaacggtggcctggctggcggaggtactcctctgggttggagggagtgtggtgctgtcttcagagtggcagctcggccccctggtggagcggtgcatgggtgccatgcaagaggggatgcagatggtgaagctgcgtggcggctccaagggcctggtccgcttctactacctggacgagcaccgctcctgcatccgctggaggccctcacgcaagaacgagaaggccaagatctccatcgactccatccaggaggtgagtgaggggcggcagtcggaggtcttccagcgctaccctgacggcagcttcgaccccaactgctgcttcagcatctaccacggcagccaccgcgagtcgctggacctggtctccaccagcagcgaggtggcgcgcacctgggtcactggcctgcgctacctcatggccggcatcagcgacgaggacagcctggctcgccgccagcgcaccagggaccagtggctgaagcagacgtttgacgaggccgacaagaacggggatggcagcctgagcattggcgaggtcctgcagctgctgcacaagctcaacgtgaacctgccccggcagagggtgaagcagatgttcagggaagcggacacggatgaccaccaagggacgctgggttttgaagagttctgtgccttctacaagatgatgtccacccgccgggacctctacctgctcatgctgacctacagcaaccacaaggaccacctggatgccgccagcctgcagcgcttcctgcaggtggagcagaagatggcgggtgtgaccctcgagagctgccaggacatcatcgagcagtttgagccatgcccagaaaacaagagtaaggggctgctgggcattgatggcttcaccaactacaccaggagccctgctggtgacatcttcaaccctgagcaccaccatgtgcaccaggacatgacgcagccgctgagccactacttcatcacctcgtcccacaacacctacctcgtgggtgaccagctcatgtcccagtcacgggtggacatgtatgcttgggtcctgcaggctggctgccgctgcgtggaggtggactgctgggatgggcccgacggggagcccattgtgcaccatggctacactctgacttccaagatcctcttcaaagacgtcattgaaaccatcaacaaatatgccttcatcaagaatgagtacccagtgatcctgtccatcgaaaaccactgcagtgtcatccagcagaagaaaatggcccagtatctgactgacatccttggggacaagctggacctgtcatcagtgagcagtgaagatgccaccacactcccctctccacagatgctcaagggcaagatcctcgtgaaggggaagaagctcccagccaacatcagcgaggatgcggaggaaggcgaggtgtctgatgaggacagtgctgatgagattgacgatgactgcaagctcctcaatggggatgcatccaccaatcgaaagcgtgtagaaaacactgctaagaggaaactggattccctcatcaaagagtcgaagattcgggactgtgaggaccccaacaacttctccgtctccacactgtccccatctggaaagctcggacgcaagagcaaggctgaagaggacgtggagtctggggaggatgccggggccagcagacgcaatggccgcctcgtcgtgggaagcttctccaggcgcaagaagaagggcagcaagctgaagaaggcggccagcgtggaggagggagatgagggtcaggactccccgggaggccagagccgaggggcgacccggcagaagaagaccatgaagctgtcccgggccctctctgacctggtgaagtacaccaagtccgtggccacccacgacatagagatggaggcggcgtccagctggcaggtgtcgtccttcagcgagaccaaggcccaccagattctgcagcagaagccggcgcagtacctacgcttcaaccagcagcagctctcccgcatctacccctcctcctaccgtgtggactccagcaactacaacccgcagcccttctggaacgccggctgccaaatggttgccctgaactaccagtcagaggggcggatgctgcagctgaaccgagccaagttcagcgccaacggtggctgcggctacgtactcaagcctgggtgcatgtgccagggcgtgttcaaccccaactcggaggaccccctgcccgggcagctcaagaagcagctggtgctccggatcatcagtggccagcagcttcccaagccgcgcgactccatgctgggggaccgtggggagatcatcgacccctttgtggaggtggagatcattgggctccctgtggactgcagcagggagcagacccgcgtggtggacgacaacgggttcaaccccacctgggaggagaccctggttttcatggtgcacatgccggagatcgcgctggtccgcttcctcgtctgggaccacgatcccattgggcgtgacttcattggccagaggacgctggccttcagcagcatgatgccaggctacagacacgtgtacctagaagggatggaagaggcctccatcttcgtgcatgtggctgtcagtgacatcagcggtaaggtcaagcaggctctgggcctaaaaggcctcttcctccgaggcccaaagcccggctcgctggacagtcatgctgctgggcggcccccggcccggccctccgttagccagcggatcctgcggcgcacggccagcgccccgaccaagagccagaagccgggccgcaggggcttcccggagctggtcctgggtacacgggacacaggctccaagggggtggcagacgatgtggtgccccccgggcccggacctgctccggaagccccagcccaggaggggcccggcagcggcagcccccgagacacccgccccctctccacgcagcggccactccccccactgtgcagcctggaaaccatcgctgaggagcccgccccaggccctggtcccccgccaccagcggctgtccccaccagctcttctcagggacggcccccataccccacaggacccggagccaatgtggcaagccccctagaggacactgaggagccccgagacagcaggcctcggccgtgcaacggcgagggcgccggcggggcatacgagagggcccccggcagccagacggacggcaggagccagccccggaccctgggccacctgcccgtgattagaagggtgaagagtgaggggcaggtgcccacggagcccctgggagggtggcggcccctggccgctccctttccagctcctgccgtgtactccgatgccacgggcagtgacccgctgtggcagcggctggagccatgtggccaccgagacagcgtttcctcctcctccagcatgtcatccagcgacactgtcattgacctctccctgcccagcctgggcctgggccgcagccgtgagaacctcgctggagcccacatgggacgcctgccccccaggccccactcggcttcggctgcccgcccagacctgccacctgtgaccaagagcaaatccaaccccaaccttcgggctacaggccagcggcctcccatacctgacgaactgcagcccaggtccctggccccaaggatggctggcctccccttccggcctccctggggctgcctttccctggtgggcgtgcaggactgccccgtggctgccaagtccaagagcctgggcgacctcactgctgatgactttgcccctagctttgagggcggctcccgcagactgagccacagcctgggcctcccgggagggacacggcgggtgtcggggccaggggtgagacgggacaccctgacagagcagctgcgctggctcactgtcttccagcaggcaggagacatcacgtcacccaccagcctgggcccggctggggagggggtggcagggggccctggttttgtgcggcgctcctcctcccgcagccacagccgcgtgcgtgccattgccagccgggcccgccaggcccaggagcggcagcagagactgcagggcctgggccggcagggacccccagaagaggagcggggcacccccgagggcgcctgctccgtgggccacgagggcagtgtggatgcaccagcaccctccaagggagccctcgggccagcatccgcggctgctgaaaacctggtcctgctccgcctctgaccgtcagtggtgggaacctgggcggctctggaggcccagggcaggggtgggcgtgttgtttgctcaggaaacagggcagccaggcccccaaaactgtgtccccctggctgccctgtgtcccctccacccctgcctccctcctgcccctgctcccggggaggaaaggctaaagctgctggcccggggcccacaggaggggcttcgaggctggccctgccaggcagttttcccggcgttttaggatctgtacatagagaaatatttaaatttttagaagcaaaacttatacaacattaaaatgataccaagtcc

SEQ ID NO: 136 - protein, 1416 aa, Homo sapiens
MSGPWPSPDSRTKGTVAWLAEVLLWVGGSVVLSSEWQLGPLVERCMGAMQEGMQMVKLRGGSKGLVRFYYLDEHRSCIRWRPSRKNEKAKISIDSIQEVSEGRQSEVFQRYPDGSFDPNCCFSIYHGSHRESLDLVSTSSEVARTWVTGLRYLMAGISDEDSLARRQRTRDQWLKQTFDEADKNGDGSLSIGEVLQLLHKLNVNLPRQRVKQMFREADTDDHQGTLGFEEFCAFYKMMSTRRDLYLLMLTYSNHKDHLDAASLQRFLQVEQKMAGVTLESCQDIIEQFEPCPENKSKGLLGIDGFTNYTRSPAGDIFNPEHHHVHQDMTQPLSHYFITSSHNTYLVGDQLMSQSRVDMYAWVLQAGCRCVEVDCWDGPDGEPIVHHGYTLTSKILFKDVIETINKYAFIKNEYPVILSIENHCSVIQQKKMAQYLTDILGDKLDLSSVSSEDATTLPSPQMLKGKILVKGKKLPANISEDAEEGEVSDEDSADEIDDDCKLLNGDASTNRKRVENTAKRKLDSLIKESKIRDCEDPNNFSVSTLSPSGKLGRKSKAEEDVESGEDAGASRRNGRLVVGSFSRRKKKGSKLKKAASVEEGDEGQDSPGGQSRGATRQKKTMKLSRALSDLVKYTKSVATHDIEMEAASSWQVSSFSETKAHQILQQKPAQYLRFNQQQLSRIYPSSYRVDSSNYNPQPFWNAGCQMVALNYQSEGRMLQLNRAKFSANGGCGYVLKPGCMCQGVFNPNSEDPLPGQLKKQLVLRIISGQQLPKPRDSMLGDRGEIIDPFVEVEIIGLPVDCSREQTRVVDDNGFNPTWEETLVFMVHMPEIALVRFLVWDHDPIGRDFIGQRTLAFSSMMPGYRHVYLEGMEEASIFVHVAVSDISGKVKQALGLKGLFLRGPKPGSLDSHAAGRPPARPSVSQRILRRTASAPTKSQKPGRRGFPELVLGTRDTGSKGVADDVVPPGPGPAPEAPAQEGPGSGSPRDTRPLSTQRPLPPLCSLETIAEEPAPGPGPPPPAAVPTSSSQGRPPYPTGPGANVASPLEDTEEPRDSRPRPCNGEGAGGAYERAPGSQTDGRSQPRTLGHLPVIRRVKSEGQVPTEPLGGWRPLAAPFPAPAVYSDATGSDPLWQRLEPCGHRDSVSSSSSMSSSDTVIDLSLPSLGLGRSRENLAGAHMGRLPPRPHSASAARPDLPPVTKSKSNPNLRATGQRPPIPDELQPRSLAPRMAGLPFRPPWGCLSLVGVQDCPVAAKSKSLGDLTADDFAPSFEGGSRRLSHSLGLPGGTRRVSGPGVRRDTLTEQLRWLTVFQQAGDITSPTSLGPAGEGVAGGPGFVRRSSSRSHSRVRAIASRARQAQERQQRLQGLGRQGPPEEERGTPEGACSVGHEGSVDAPAPSKGALGPASAAAENLVLLRL

SEQ ID NO: 137 - DNA, 2931 bp, Homo sapiens
  CDS (635)..(2407)
actctatgtctcctctcgttggattgtgacaccgggaggtcagggaactccaggaccttgttctctgctggattcgcagcaaccagcacagcacgtagggcgtagttggtgctggatggatgtttgttgaatgaatgaatgatgaatggctggcaccttgtctgctcatccctaactcctgttccttcatctgtgcagccctaatctttgtttcctcatctgtccatccctttatttgtgcatcctcattcttagccccttcactgcccttctccatctcttcctccttgttcatttgtccctgttctctgtcctctactccactcatgcccatctctgtccccttgacttacccagtccctgctactatctccatccctaatttctgccctcttgtctgtctactcctaattccttttccttgtccatccctaatacctgtcaccttgtccttcttcctcgaatctccatccctaatccatctgcccctaatctctgtcccctttgcccatccttccttttctcggtgtctctttccacccttatctccacacctgcccaccctgcactcccattctgtttcccatctgcacccttgccccatccctcccacacacaggaccagacggccaccatgtcaggagactacgaggatgacctctgccggcgggcactcatcctggtctcggacctctgtgcgcgggtccgagatgctgacaccaacgacaggtgccaggagttcaatgaccgaatccgaggctatccccggggtccagatgcagacatctccgtgagcctgctgtcggtcatcgtgacattctgtggcattgtccttctgggtgtctctctcttcgtgtcctggaagttgtgctgggtgccctggcgggacaagggaggctcggcagtgggcggtggccccctgcgcaaagacctaggccctggtgtcgggctggcaggcctggtaggcggaggcgggcaccacctggcggctggcctgggtggccatcctctgctgggcggcccacaccaccatgcccatgccgcccaccatccaccctttgctgagctgctggagccaggcagcctggggggttctgacacccctgagccctcctacttggacatggactcgtatccagaggctgcagcagcagcagtggccgctggggtcaaaccgagccaaacatcccctgagctgccctctgaggggggagcaggctctgggttgctcctgctgccccccagtggtgggggcttgcccagtgcccagtcacatcagcaggtcacaagcctggcacccactaccaggtacccagccctgccccgacccctcacccagcagactctgacctcccagccggaccccagcagtgaggagcgcccacctgccctgcccttacccctgcctggaggcgaggaaaaagccaaactcattgggcagattaagccagagctgtaccaggggactggccctggtggccggcggagcggtgggggcccaggctctggagaggcaggcacaggggcaccctgtggccgtatcagcttcgccctgcggtacctctatggctcggaccagctggtggtgaggatcctgcaggccctggacctccctgccaaggactccaacggcttctcagacccctacgtcaagatctacctgctgcctgaccgcaagaaaaagtttcagaccaaggtgcacaggaagaccctgaaccccgtcttcaatgagacgtttcaattctcggtgcccctggccgagctggcccaacgcaaactgcacttcagcgtctatgactttgaccgcttctcgcggcacgacctcatcggccaggtggtgctggacaacctcctggagctggccgagcagccccctgaccgcccgctctggagggacatcgtggagggcggctcggaaaaagcagatcttggggagctcaacttctcactctgctacctccccacggccgggcgcctcaccgtgaccatcatcaaagcctctaacctcaaagcgatggacctcactggcttctcagacccctacgtgaaggcctccctgatcagcgaggggcggcgtctgaagaagcggaaaacctccatcaagaagaacacgctgaaccccacctataatgaggcgctggtgttcgacgtggcccccgagagcgtggagaacgtggggctcagcatcgccgtggtggactacgactgcatcgggcacaacgaggtgatcggcgtgtgccgtgtgggccccgacgctgccgacccgcacggccgcgagcactgggcagagatgctggccaatccccgcaagcccgtggagcactggcatcagctagtggaggaaaagactgtgaccagcttcacaaaaggcagcaaaggactatcagagaaagagaactccgagtgaggggtctggcctaggcccgggatcggaccaggctccctcaggaccccatcctttcctgcccggaccgtgaattcatctccttgaagccataacgtccgagctgctggtgcggggcagccctggccctaggcttcctaaccctggaagcgagaggatgagaggaggccggcccagctccttctttcagggtgggggtcattcagcctccactgtgtctgtcttttcttccctggggctccccctcgaggcgaggggccatgcatgtctgggggacccctgccccccaaaaccctctgtctgtctctgtctctttgctgtttgtccaagactcagtgtcccgacccttgttctcgccgtgaatgtcaatgggccaatcctctctgtcctttcagacacacacacacctgtgtccaccccttctgttcgccacaccctgcgtctggccggtccccccactgctgctgctatcaacgccagaataaacacactctgtgggtctcactccaaaaaaaaaaaaaaaaaaa

SEQ ID NO: 138 - protein, 590 aa, Homo sapiens
MSGDYEDDLCRRALILVSDLCARVRDADTNDRCQEFNDRIRGYPRGPDADISVSLLSVIVTFCGIVLLGVSLFVSWKLCWVPWRDKGGSAVGGGPLRKDLGPGVGLAGLVGGGGHHLAAGLGGHPLLGGPHHHAHAAHHPPFAELLEPGSLGGSDTPEPSYLDMDSYPEAAAAAVAAGVKPSQTSPELPSEGGAGSGLLLLPPSGGGLPSAQSHQQVTSLAPTTRYPALPRPLTQQTLTSQPDPSSEERPPALPLPLPGGEEKAKLIGQIKPELYQGTGPGGRRSGGGPGSGEAGTGAPCGRISFALRYLYGSDQLVVRILQALDLPAKDSNGFSDPYVKIYLLPDRKKKFQTKVHRKTLNPVFNETFQFSVPLAELAQRKLHFSVYDFDRFSRHDLIGQVVLDNLLELAEQPPDRPLWRDIVEGGSEKADLGELNFSLCYLPTAGRLTVTIIKASNLKAMDLTGFSDPYVKASLISEGRRLKKRKTSIKKNTLNPTYNEALVFDVAPESVENVGLSIAVVDYDCIGHNEVIGVCRVGPDAADPHGREHWAEMLANPRKPVEHWHQLVEEKTVTSFTKGSKGLSEKENSE

SEQ ID NO: 139 - DNA, 4744 bp, Homo sapiens
  CDS (72)..(3059)
aatcagctcagcgaagccgccgcagaggctgatggggggctggaggctgtgaggcttccagcgtcggtaccatggcgacgcgcggtggggctggggtggcaatggcggtttggtccctcttatccgcccgggccgtgaccgcgttccttctgttgttcctccctcgcttcttacaggcccagaccttctctttccctttccagcagccggagaagtgcgacaacaaccagtactttgatatctccgccctctcgtgtgttccttgtggagctaaccagaggcaagatgcccgaggaacttcatgtgtatgtctaccaggatttcagatgatctctaataatggaggacctgctattatttgtaaaaagtgcccagaaaacatgaaaggtgttacagaagatggctggaactgcatttcttgccctagtgacttaactgccgaaggaaaatgtcactgtcccattggccatattttagtggaaagagacattaatggaacattgttgtctcaagcaacttgtgagctctgtgatggaaatgaaaactcttttatggtagtaaatgctttaggagacaggtgcgtccgatgtgagccaacatttgttaataccagcaggtcctgtgcatgttcagaacctaacattttaacagggggattatgtttcagcagcacagggaattttcctctacgtagaatttcagctgcacgttatggagaagttggcatgtctttaacttcagaatggtttgcaaagtatttgcaatcatcagcagctgcatgttgggtatatgccaatctaacatcttgtcaagctcttggaaatatgtgtgtgatgaacatgaattcttacgactttgccacatttgatgcatgtggactatttcagtttatctttgaaaatactgctggactgagcactgttcattctatttcattttggagacagaatcttccttggctgttttatggagaccagttaggattagcacctcaagtgctcagttctacctctcttcctacaaatttcagttttaaaggagaaaaccagaatacaaaactgaagtttgttgctgcttcctatgatataagaggaaattttctcaagtggcaaactttagaaggaggtgttttacagctttgtccagacacagagacaaggctaaatgctgcttattcatttggaacaacctaccaacaaaattgtgagattcctatctctaagatcttaattgactttcccactcctatattttatgatgtgtaccttgaatatactgatgaaaatcaacatcaatatattttggctgtgcctgtgttaaacctaaatcttcaacataataagatatttgtgaaccaagacagcaactctggaaagtggcttctaactcggcgcattttcttagtggatgcagtaagtggacgagaaaatgacttaggaactcagccaagagtaattcgagttgctactcaaatatcactgagtgtccaccttgtacccaacacaataaatggaaacatctaccctcccttaatcaccattgcctacagtgacattgatatcaaagatgccaacagccagtctgtgaaggtttctttctcagtcacatatgaaatggatcatggagaagcacatgtccagacagatattgctttgggtgtattgggtgggctagctgttttagcatctcttttgaagacagcaggatggaagaggcgcattgggagtcccatgattgatttacagacagttgtgaaattcttggtgtactatgctggtgatctggccaatgttttctttatcatcacagtgggaacaggtctttactggcttattttcttcaaagcacagaagtctgtgtctgttttgctgccaatgccaattcaggaagaacgttttgtcacttatgttggatgtgcctttgctctgaaggcactacaatttttgcataagctcatatcccagattacaatagatgtattctttattgattgggagcgacctaaaggaaaggttcttaaagctgttgaaggtgagggtggtgtacgaagtgccactgttcctgtaagcatatggagaacatattttgtagcaaatgaatggaatgaaattcagactgtgagaaaaattaattcactctttcaagtacttactgtcctcttctttttggaggttgtgggattcaagaacttagcattaatggactcatcttctagtctttctagaaacccacctagctacatagctccttatagctgcattttgagatatgcagtgtctgctgctctttggctagccattggaattatacaggtcgtgttctttgctgtcttttatgagagatttatagaagataaaattcgacagttcgttgatttatgctctatgagtaatatatcagtgtttctgttatcccacaaatgttttggatattacattcatggtagatcagtacatgggcatgcagatactaatatggaagaaatgaatatgaaccttaaaagagaagcggaaaatttgtgtagccagagaggtttggtacccaacacagatggtcagacttttgagattgcaatttctaaccagatgagacaacattatgacagaattcatgagacactaataaggaaaaatggtcctgctagactactgagttcatcagcaagtacttttgagcagagtataaaagcatatcatatgatgaataaatttcttggctccttcattgaccatgttcataaggaaatggattactttataaaagataagttgcttcttgaaagaattcttggaatggaattcatggaaccaatggaaaaaagcatcttttacaatgatgaaggttattctttcagcagtgtcctgtattatggaaatgaagctactcttcttatttttgatctgctgttcttctgtgttgtggatttggcttgccaaaattttattttagcatccttccttacatatctacaacaagagatttttagatatatccgtaatacagtaggacaaaagaatttggcatccaaaacattggtggatcaaagatttttgatttaacttcctgaataaataacttaaagactcagtataatcatggccaaaaaaaagtcatgatatcaggttagtttgccatattttttaaaacttataatgcagactattctgtttttgttttttatttgcagaaagatttatttttataacttgggaatatataacctgatataatagaaaatactgttttcccattgtgtgtagtatttaatgcagtaaataataaattaatactgacagtgaggccaaaaaaaatctaaatgttgctttcagcataatactttttaatgctaattaaaacagtccccatcatttgtctctgtagattattttataaactgagagctgcctgaatcttctcacattgacaaagtaatttgattccaagtttaagactagttttcagtttgatattttcatgttttgtgtgcttatggttaaataaatgttgaaagatattttcaagtttacttagaaattttaaattgtattattgctgattcaatttgcatcattctaattgctcatcctctttggcagtggattaattcactgttgggttaatatgcatctcatgaaatgatatcttttcattcctttgtatacctgtattaggtcagtatacgctttccatgaaatatatttgcatttctaatatagtttacatttattaagttataacgtatgacatttttcccaatatcattttttatacattttaattacttaatgttttaagagttctcttccagagttttgcttttcaattacgtttaaagactgtaaataacaaacagtaaggctgggcgctgtggcttacgcctgtaatcccagcactttggaaggccaaggcacgtggatcactttaggtcaggagttcaagaacagcctggccaacatggaaaaccccatctctacaaaaaatacaaaaattagttggatgtggtggcctgtaatcccagctatttgggaggctgaggcatgagaatagcttgaaaccaggaggtggaggctgtagtgagccagatagcaccactgcactccagccaggatgacagagcaagaccctgtctcagaaaaaacaaaaacaaaacactgtaaatgtatcatgtttctcactgctttctatgttaatgctgtgtaaatacttaaaatggaatactgtataaatattatttatattttctcagatgaaaatatatactaaaacatttggtatttctgttttctgtttcattaatgtatatctgatggagtaccatttaggaatataacattattggggcagaggtcccagccattgccaaagttgaatcttttacatttccctgaatcttgaggatgactgaaaaggaagtctttgaaactgcagtttctgaaggatcacagtacaggaatgcctttataaaagctgcagagataaatacatgtacttatatggcatggatatttaaaaccactcactcagaagcatatgaaagaaattcaaccatcattcaacatagaagaagttaattttagtgcaaaagtttttaagtattaaatttcacaataaaggatcaattggcttacttgctgataaattaaaacagaaaacatttaaaatcattctaaattttgtatgatatttttattttggctaggtgcataaaaatgtgttcagattttcaaaaaaaaaaaaaaaaaaa

SEQ ID NO: 140 - protein, 995 aa, Homo sapiens
MATRGGAGVAMAVWSLLSARAVTAFLLLFLPRFLQAQTFSFPFQQPEKCDNNQYFDISALSCVPCGANQRQDARGTSCVCLPGFQMISNNGGPAIICKKCPENMKGVTEDGWNCISCPSDLTAEGKCHCPIGHILVERDINGTLLSQATCELCDGNENSFMVVNALGDRCVRCEPTFVNTSRSCACSEPNILTGGLCFSSTGNFPLRRISAARYGEVGMSLTSEWFAKYLQSSAAACWVYANLTSCQALGNMCVMNMNSYDFATFDACGLFQFIFENTAGLSTVHSISFWRQNLPWLFYGDQLGLAPQVLSSTSLPTNFSFKGENQNTKLKFVAASYDIRGNFLKWQTLEGGVLQLCPDTETRLNAAYSFGTTYQQNCEIPISKILIDFPTPIFYDVYLEYTDENQHQYILAVPVLNLNLQHNKIFVNQDSNSGKWLLTRRIFLVDAVSGRENDLGTQPRVIRVATQISLSVHLVPNTINGNIYPPLITIAYSDIDIKDANSQSVKVSFSVTYEMDHGEAHVQTDIALGVLGGLAVLASLLKTAGWKRRIGSPMIDLQTVVKFLVYYAGDLANVFFIITVGTGLYWLIFFKAQKSVSVLLPMPIQEERFVTYVGCAFALKALQFLHKLISQITIDVFFIDWERPKGKVLKAVEGEGGVRSATVPVSIWRTYFVANEWNEIQTVRKINSLFQVLTVLFFLEVVGFKNLALMDSSSSLSRNPPSYIAPYSCILRYAVSAALWLAIGIIQVVFFAVFYERFIEDKIRQFVDLCSMSNISVFLLSHKCFGYYIHGRSVHGHADTNMEEMNMNLKREAENLCSQRGLVPNTDGQTFEIAISNQMRQHYDRIHETLIRKNGPARLLSSSASTFEQSIKAYHMMNKFLGSFIDHVHKEMDYFIKDKLLLERILGMEFMEPMEKSIFYNDEGYSFSSVLYYGNEATLLIFDLLFFCVVDLACQNFILASFLTYLQQEIFRYIRNTVGQKNLASKTLVDQRFLI

SEQ ID NO: 141 - DNA, 1076 bp, Homo sapiens
  CDS (485)..(787)
cgcttgctgactgagctgaaaagggactccccacagagcaggctcaccagtgtcccgacagccgggcagatcacggggacggggaattctgagcagaccctcttcagaagttgagtctcaaggggccttggggaacttggtcagcagatggcaagacttcatctgtcagtgggcgggtcagctcagcaggactcctgtctttggaactgagactcaagtctctactctgtaccaagacagagttggaggctaagaaacaagacacacaaccattttccatcattgaggggcaaggcagggcttggcatgaggcagaaccgggctccatcaatgccacatgtcaggaggaaccccttttctgtttcaatccctcctgcccatttgtgggaggcattagagaggcctgacatagtttttttttctccacggcctgaggacgtgataggatttcattcccgccccaccttgttggttggatggaatcatgcgcccaattgtggtcaagaccaagaaactgagaaacgaagcaaatccgtgggatgcagagggtacgctgatgacttctgctggggagagaagcccaaacacacgtcctgggcagagcccagagaccgggagtgtggctgccagtgagcacccggctgagggacaagcaggtgggcctcagtggtggctgccaggtccctggacgccgggggccaccggccttgcctctcctctgcctcggaagcaccggaggctttggggatctggtggtcctctggccctgaacgtggacctggtgtgacaaagggaagtttgccatctccatcctcctcaagctgcctgtgcaccccagtagcacccaccctctctgtgctcccgtctgcaccgcatgtcctggggtccttctttgtactgcacccaatgacaggaaccagtgccctgactgtgacttgcttcccccctcagggacacacaagcactttcacatcgaggctacttttcaccccttctgcctcctgcagggacgctgcatgcagaggcaggaggacagaggggctggtctcaggtgtggcttctctcacacctggcgc

SEQ ID NO: 142 - protein, 100 aa, Homo sapiens
MRPIVVKTKKLRNEANPWDAEGTLMTSAGERSPNTRPGQSPETGSVAASEHPAEGQAGGPQWWLPGPWTPGATGLASPLPRKHRRLWGSGGPLALNVDLV

SEQ ID NO: 143 - DNA, 1038 bp, Homo sapiens
  CDS (1)..(1038)
atgaatttggagggcacttcaggtggcatacttcaaaaagaattctggagaaacagaattcagtataaccagagtcaaaaggatatcctccaatcatggtttcaacatgaccctttccctgataaagctgccagagaacaactggccaaagaaattggggttccagaatctaatattcaggtttggtttaaaaattacagagtaaaacagagaaaactggattataagtgcttctcagaaaaagatcaaacccaggggcatgaccagtcccagcatctgactcaagaatacttacctaaagaagcccgacaaaaacagacattcatcacatggactcaaaaaaacaggctagtgcaagcctttgagaggaacccattccctgatattgctaccagaaaaaaactggctgaacaaacaggcctgcaggaatcaagaattcaaatgtggtttcagaaacaaagatctctgtacctcaagaagagcagaatggagcccatgaatttattggtagacgacccaaatgagagaccagatgcaactgttgggtggcatccaatcaacctgttcctccccacagacagctctcattatttttcttgctcacattcttccagcgggcatgaaactcttccacctgttcttccttcaacccaggctccttgggatcccttcaggttccatgtgagccaaggaccaaatgtcatgatcatgcagcccacacaggctgtgcaggaaggagagaagtctgatcagcctctgataattccgaatcacctcctgacactgccaattctgacaaaggacttagatactccgactcccttctggctccaataccaagaagaacaccaaaatcacaaagaacactctggctcgggagtaccacaggtcaagagccattctcagcctgaacctgagcacagggagcaacaacctctaaatctgggtcagtttgacatatcgaacattttgcaaaggtgggacgagatctgccaggctctgcttgctgaatgggaccctctcaaagggacacactga

SEQ ID NO: 144 - protein, 345 aa, Homo sapiens
MNLEGTSGGILQKEFWRNRIQYNQSQKDILQSWFQHDPFPDKAAREQLAKEIGVPESNIQVWFKNYRVKQRKLDYKCFSEKDQTQGHDQSQHLTQEYLPKEARQKQTFITWTQKNRLVQAFERNPFPDIATRKKLAEQTGLQESRIQMWFQKQRSLYLKKSRMEPMNLLVDDPNERPDATVGWHPINLFLPTDSSHYFSCSHSSSGHETLPPVLPSTQAPWDPFRFHVSQGPNVMIMQPTQAVQEGEKSDQPLIIPNHLLTLPILTKDLDTPTPFWLQYQEEHQNHKEHSGSGVPQVKSHSQPEPEHREQQPLNLGQFDISNILQRWDEICQALLAEWDPLKGTH

SEQ ID NO: 145 - DNA, 3946 bp, Homo sapiens
  CDS (10)..(3507)
gaggccaccatgcaggatgtccaaggcccccgtcccggaagccccggggatgctgaagaccggcgggagctgggcttgcacaggggcgaggtcaactttggagggtctgggaagaagcgaggcaagtttgtacgggtgccgagcggagtggccccgtctgtgctctttgacctgctgcttgctgagtggcacctgccggcccccaacctggtggtgtccctggtgggtgaggagcagcctttcgccatgaagtcctggctgcgggatgtgctgcgcaaggggctggtgaaggcggctcagagcacaggagcctggatcctgaccagtgccctccgcgtgggcctggccaggcatgtcgggcaggccgtgcgcgaccactcgctggccagcacgtccaccaaggtccgtgtggttgctgtcggcatggcctcgctgggccgcgtcctgcaccgccgcattctggaggaggcccaggaggattttcctgtccactaccctgaggatgacggcggcagccagggccccctctgttcactggacagcaacctctcccacttcatcctggtggagccaggccccccggggaagggcgatgggctgacggagctgcggctgaggctggagaagcacatctcggagcagagggcgggctacgggggcactggcagcatcgagatccctgtcctctgcttgctggtcaatggtgatcccaacaccttggagaggatctccagggccgtggagcaggctgccccgtggctgatcctggtaggctcggggggcatcgccgatgtgcttgctgccctagtgaaccagccccacctcctggtgcccaaggtggccgagaagcagtttaaggagaagttccccagcaagcatttctcttgggaggacatcgtgcgctggaccaagctgctgcagaacatcacctcacaccagcacctgctcaccgtgtatgacttcgagcaggagggctccgaggagctggacacggtcatcctgaaggcgctggtgaaagcctgcaagagccacagccaggagcctcaggactatctggatgagctcaagctggccgtggcctgggaccgcgtggacatcgccaagagtgagatcttcaatggggacgtggagtggaagtcctgtgacctggaggaggtgatggtggacgccctggtcagcaacaagcccgagtttgtgcgcctctttgtggacaacggcgcagacgtggccgacttcctgacgtatgggcggctgcaggagctctaccgctccgtgtcacgcaagagcctgctcttcgacctgctgcagcggaagcaggaggaggcccggctgacgctggccggcctgggcacccagcaggcccgggagccacccgcggggccaccggccttctccctgcacgaggtctcccgcgtactcaaggacttcctgcaggacgcctgccgaggcttctaccaggacggccggccaggggaccgcaggagggcggagaagggcccggccaagcggcccacgggccagaagtggctgctggacctgaaccagaagagcgagaacccctggcgggacctgttcctgtgggccgtgctgcagaaccgccacgagatggccacctacttctgggccatgggccaggaaggtgtggcagccgcactggccgcctgcaaaatcctcaaagagatgtcgcacctggagacggaggccgaggcggcccgagccacgcgcgaggcgaaatacgagcggctggcccttgacctcttctccgagtgctacagcaacagtgaggcccgcgccttcgccctgctggtgcgccggaaccgctgctggagcaagaccacctgcctgcacctggccaccgaggctgacgccaaggccttctttgcccacgacggcgttcaggccttcctgaccaggatctggtggggggacatggccgcaggcacgcccatcctgcggctgctaggagccttcctctgccccgccctcgtctataccaacctcatcaccttcagtgaggaagctcccctgaggacaggcctggaggacctgcaggacctggacagcctggacacggagaagagcccgctgtatggcctgcagagccgggtggaggagctggtggaggcgccgagggctcagggtgaccgaggcccacgtgctgtcttcctgctcacacgctggcggaaattctggggcgctcccgtgactgtgttcctggggaacgtggtcatgtacttcgccttcctcttcctgttcacctacgtcctgctggtggacttcaggccgcccccccagggcccctcagggcccgaggtcaccctctacttctgggtctttacgctggtgctggaggaaatccggcagggcttcttcacagacgaggacacacacctggtgaagaagttcacactgtatgtgggggacaactggaacaagtgtgacatggtggccatcttcctgttcatcgtgggtgtcacctgcaggatgctgccgtcggcgtttgaggctggccgcacagtcctcgccatggacttcatggtgttcacgctgcggctgatccatatctttgccatacacaagcagctgggccccaagatcatcgtggtagagcgcatgatgaaggacgtcttcttcttcctcttctttctgagcgtgtggctcgtggcctacggtgtcaccacccaggcgctgctgcacccccatgacggccgcctggagtggatcttccgccgggtgctctaccggccctacctgcagatcttcggccagatcccactggacgagattgatgaagcccgtgtgaactgctccacccacccactgctgctggaggactcaccatcctgccccagcctctatgccaactggctggtcatcctcctgctggtcaccttcctgttggtcaccaatgtgctgctcatgaacctgctcatcgccatgttcagctacacgttccaggtggtgcagggcaacgcagacatgttctggaagttccagcgctacaacctgattgtggagtaccacgagcgccccgccctggccccgcccttcatcctgctcagccacctgagcctgacgctccgccgggtcttcaagaaggaggctgagcacaagcgggagcacctggagagagacctgccagaccccctggaccagaaggtcgtcacctgggagacagtccagaaggagaacttcctgagcaagatggagaagcggaggagggacagcgagggggaggtgctgcggaaaaccgcccacagagtggacttcattgccaagtacctcgggggtctgagagagcaagaaaagcgcatcaagtgtctggagtcacagatcaactactgctcggtgctcgtgtcctccgtggctgacgtgctggcccagggtggcggcccccggagctctcagcactgtggcgagggaagccagctggtggctgctgaccacagaggtggtttagatggctgggaacaacccggggctggccagcctccctcggacacctgagctgcttggcctgccacgtgtggggccacctctcctcagctggccaccctgcacgttgtgcactgacctttgccgacctccagcggaaccccccagggggcaccagccccccagcagacaatggccctcctggtgcctcaccacagaccctcacccaaaggaaccgctccttgtccctcctggcctccccggaggcacagcagtgtcatggggctgtctcccctgacaggcacaactccccgggcagaaaacgtgccccaccgcatccctacctggaaactgaccagcctgcactgtggaaaagctggccctgtggcgtgacgggggagcacccccatccagactgcgaagctgctctggggtctgcacccacccctgccctgacttgtgttgcctgacaagagactcatctttttttgaaaaaaaaaaaaaaaaaaaa

SEQ ID NO: 146 - protein, 1165 aa, Homo sapiens
MQDVQGPRPGSPGDAEDRRELGLHRGEVNFGGSGKKRGKFVRVPSGVAPSVLFDLLLAEWHLPAPNLVVSLVGEEQPFAMKSWLRDVLRKGLVKAAQSTGAWILTSALRVGLARHVGQAVRDHSLASTSTKVRVVAVGMASLGRVLHRRILEEAQEDFPVHYPEDDGGSQGPLCSLDSNLSHFILVEPGPPGKGDGLTELRLRLEKHISEQRAGYGGTGSIEIPVLCLLVNGDPNTLERISRAVEQAAPWLILVGSGGIADVLAALVNQPHLLVPKVAEKQFKEKFPSKHFSWEDIVRWTKLLQNITSHQHLLTVYDFEQEGSEELDTVILKALVKACKSHSQEPQDYLDELKLAVAWDRVDIAKSEIFNGDVEWKSCDLEEVMVDALVSNKPEFVRLFVDNGADVADFLTYGRLQELYRSVSRKSLLFDLLQRKQEEARLTLAGLGTQQAREPPAGPPAFSLHEVSRVLKDFLQDACRGFYQDGRPGDRRRAEKGPAKRPTGQKWLLDLNQKSENPWRDLFLWAVLQNRHEMATYFWAMGQEGVAAALAACKILKEMSHLETEAEAARATREAKYERLALDLFSECYSNSEARAFALLVRRNRCWSKTTCLHLATEADAKAFFAHDGVQAFLTRIWWGDMAAGTPILRLLGAFLCPALVYTNLITFSEEAPLRTGLEDLQDLDSLDTEKSPLYGLQSRVEELVEAPRAQGDRGPRAVFLLTRWRKFWGAPVTVFLGNVVMYFAFLFLFTYVLLVDFRPPPQGPSGPEVTLYFWVFTLVLEEIRQGFFTDEDTHLVKKFTLYVGDNWNKCDMVAIFLFIVGVTCRMLPSAFEAGRTVLAMDFMVFTLRLIHIFAIHKQLGPKIIVVERMMKDVFFFLFFLSVWLVAYGVTTQALLHPHDGRLEWIFRRVLYRPYLQIFGQIPLDEIDEARVNCSTHPLLLEDSPSCPSLYANWLVILLLVTFLLVTNVLLMNLLIAMFSYTFQVVQGNADMFWKFQRYNLIVEYHERPALAPPFILLSHLSLTLRRVFKKEAEHKREHLERDLPDPLDQKVVTWETVQKENFLSKMEKRRRDSEGEVLRKTAHRVDFIAKYLGGLREQEKRIKCLESQINYCSVLVSSVADVLAQGGGPRSSQHCGEGSQLVAADHRGGLDGWEQPGAGQPPSDT

SEQ ID NO: 147 - DNA, 539 bp, Homo sapiens
  CDS (9)..(356)
cgcccagcatgccgaggaggaggagacgccgagggtcctccggtgctggcggccgggggcggacctgctctcgcaccgtccgagcggagctttcgttttcagtgagccaggtggagcgcagtctacgggagggccactacgctcagcgcctgagtcgcacggcgccggtctacctcgctgcggttattgagtacctgacggccaaggtcctggagctggcgggcaacgaggcccagaacagcggagagcggaacatcactcccctgctgctggacatggtggttcacaacgacaggctactgagcacccttttcaacacgaccaccatctctcaagtggcccctggcgaggactagcttctgacacccggcccctgggacctgacaggtccactcgtccacccacccggccccaaatcccccggcctgaacccccggccttaaacaccctccccccacaacccaggccccaaagtcttgggccttcattaattctgtcaataaaatgtttcaaggaaaaaaaaaaaaaaaaaaaaaaaa

SEQ ID NO: 148 - protein, 115 aa, Homo sapiens
MPRRRRRRGSSGAGGRGRTCSRTVRAELSFSVSQVERSLREGHYAQRLSRTAPVYLAAVIEYLTAKVLELAGNEAQNSGERNITPLLLDMVVHNDRLLSTLFNTTTISQVAPGED

SEQ ID NO: 149 - DNA, 2092 bp, Homo sapiens
  CDS (414)..(968)
ggcgtaattaaaaagcggcggaagaaggtgggagggtcatgacgcagcgagtttcagtcgtgacttttctgggggcatcgcggcgtcccctttttttgcctttaaagtaaaacgtcgccccgacgcaccccccgcgtatttcggggggcggaggcggcgggccacggcgcgaagaggggcggtgctgacgccggccggtcacgtgggcgtgttgtgggggggaggggcgccgccgcgcggtcggttccgggcggttgggagcgcgcgagctagcgagcgagaggcagccgcgcccgccgccgcccctgctctgtatgccgctctctcccggcgcggccgccgccgatcacagcagcaggagccaccgccgccgcggttgatgtggttgggccggggctgaggaggccgccaagatgccgcagtccaagtcccggaagatcgcgatcctgggctaccggtctgtggggaaatcctcattgacgattcaatttgttgaaggccaatttgtggactcctacgatccaaccatagaaaacacttttacaaagttgatcacagtaaatggacaagaatatcatcttcaacttgtagacacagccgggcaagatgaatattctatctttcctcagacatactccatagatattaatggctatattcttgtgtattctgttacatcaatcaaaagttttgaagtgattaaagttatccatggcaaattgttggatatggtggggaaagtacaaatacctattatgttggttgggaataagaaagacctgcatatggaaagggtgatcagttatgaagaagggaaagctttggcagaatcttggaatgcagcttttttggaatcttctgctaaagaaaatcagactgctgtggatgtttttcgaaggataattttggaggcagaaaaaatggacggggcagcttcacaaggcaagtcttcatgctcggtgatgtgattctgctgcaaagcctgaggacactgggaatatattctacctgaagaagcaaactgcccgttctccttgaagataaactatgcttcttttttcttctgttaacctgaaagatatcatttgggtcagagctcccctcccttcagattatgttaactctgagtctgtccaaatgagttcacttccattttcaaattttaagcaatcatattttcaatttatatattgtatttcttaatattatgaccaagaattttatcggcattaatttttcagtgtagtttgttgtttaaaataatgtaatcatcaaaatgatgcatattgttacactactattaactaggcttcagtatatcagtgtttatttcattgtgttaaatgtatacttgtaaataaaatagctgcaaacctcagtcctttgtgctacttgatgtggctttcaaagaagagaagccttgtcctgagtttctcacttggcttcaggaaggccccaggttggattccagaaaccagtgaagatgtggccacaggaggaggtgtgctgaggtggctgctgaccgtggactccctgcgcagtggcctgcagatgttggggctgggttacagctgattgaagctgagtggccctggggggtctgtgaggggagttcctccccagtgatgaaattctctccttccaccctcaaatccctagaccttgactgaaatgctccgtggtcgggagcctggtcaaggaggaggagctgctgagaggcattgttcgcccttgctcatagcttagctcgatgtccgtgtcagacaggagatgattgagaacagccttgcctgtcactgtcctagaacaccctggagtttagtgttctgtgtcagagtcttgggagcctccttcagacccagatgacgggcctccctctgtccaaggagcagctgtaaaggagaagagggatttcatttgtttggtggctgttaccttgtctgtaagtcaaacttggagttgagcagtgctttttaaacgattcccttttgcagctaaaatttcacagggctatttctaatacgtaagcaaatgttaccattgactttattaataaaatatagttttgctttgcaaaaaaaaaaaaaaaaaa

SEQ ID NO: 150 - protein, 184 aa, Homo sapiens
MPQSKSRKIAILGYRSVGKSSLTIQFVEGQFVDSYDPTIENTFTKLITVNGQEYHLQLVDTAGQDEYSIFPQTYSIDINGYILVYSVTSIKSFEVIKVIHGKLLDMVGKVQIPIMLVGNKKDLHMERVISYEEGKALAESWNAAFLESSAKENQTAVDVFRRIILEAEKMDGAASQGKSSCSVM

SEQ ID NO: 151 - DNA, 2607 bp, Homo sapiens
  CDS (270)..(635)
agtgttccagttcaaagagtacctgctgcagttggtggaagtataaagcattttctgtttgataagagaactggccaaggtgcccggcttggtaggggataccagacaaccaaaggccatatatggacttggcaatccactggtccctggacccggataagtttccagggaaggctgcatagacagctatgaaagctggtcagtgaaagtgaaacctgtgtctttgcacctgggcatcagctgcttggctctccacttatgcactgtgtatgtctcttgcatgcctgaggacattcttgggggtggatgttttgcaagacttggcagctgtgccacctgtcatggacttgatggaccgtttgacaacagaactgggatggtgccactgtgtggtggacttgaccaatgcattcttctcaatcagcattgctccagagagccaggaacagtttgccttcatgggagggcgacaatggactttcatagtgttgctgcagggctatatgtatagccccattatatatcattttcttattaatgatgttatgttaacctctagttcttttgctggtttggaggccacaacacccctcttgcctgggattgggatgatgaggctgaaacagcccttctgatgacataagccctctgggtggttaaccagggtgcccatttaaactagatgtgcatgtaaccaccaatagagttggctagggcctatggcagtatatggagtgcttggaagcgccagtcagcttttagtcccagctatggaagggagctgagccccagtgttcattaataaagaagcagttagtaaccatatatgctgcccttcaggttcataagagcgtggctggatgggttacagtcgtgtggatggcttaccccatagtgggatgggtgcgttcatgagcaatgacccccccagactgggacagcacagacatccactttagcgaagtggggcacctacttagagcagtggagtacgctaagtataagtcccttagcagcagagttgcaagaggtcttggaacctgtagtcctaatgcaagataaggccatggggcctggggcacccctagaccccgagccttcactgttagaaagggtgttcttccattcctaataggacatggtacacagctatgtctagttggggtgccactgctgcctggactgctggtgcagtccagcctagtactgacaccatatggtttgaaaccaggtgtagacagcggggcagtcaggattatcaatatcactgttttacagcttcacatcttagctgactggaaagccttccaggagcagtaatatgcatggagctgtcatctcctatgataacaatgccttcttctggaataccttctgtaggatctgcctgaggctgttttacagttaactttttttaaataagtagaagtacactctaaaatattaaattggtgcaaaagtaattgccgtttttgccattgcagttacttttgcaccaacctaataacaataaaaagtaaggtaaatacacaaaccagtgatatagtactttcctatcaggtattatatagtgctattttttttttgagaccgagtctcactctttacccagaatgcaggcagtggcatgatcttggctcacgacaacctctgcctctcggattcaaccgattcttgtgcctcagcctcccaagtagctgggaatataggtgtgagccaccacgcctggctaatttttgtatttttagtagagacagggtttcatcatgttggccaggctggtcttgaactcctgacctcaggtgatccacccgccttggcctcccaaagtgctgggattacaagcgtgagccaccacactaggcctttagtgctatacttttatatgattggcagtgcagtaagtttgtttacaccagtatcaccacaaacatataattgtgctatgatgtcactagttaataggcattttccagctccattataatcttatgtgatcactgtcatttctgcagtccattattgaccaaaatgtccttgtgtggttcataactgtactcaaatatctacaaagagagtttcttctggtacccagtaaatatttcattacttaatatactctcccccctgctcctgcgaacctcactccatcctaagaacaatcttcgcatctgcctttctggactttctgctatgaactaaatatttattcaccagagaaactgctgtatactaggtgttatgaaatataatttttttatatcaaagacattgtataattacatgaagaccaatggagtaattcatcttaattctaagtattagaaaagctttgttttccttgaagaatggacatatttttttccttctaaaacaatgtaagcaaatgaccttctcattttggttgccagaatgctcagtttgtatccctaactgactgcctgtgtaggttatcataacttgtcctgatctcctagtgctcatttgtatgtgttgttttctattttactgtatcttgttcgccatcttgagtcatttttttacacacaatggagttataataaaatagctattgcctattatgataaaagaaataccttctagctt

SEQ ID NO: 152 - protein, 121 aa, Homo sapiens [sequence omitted]

SEQ ID NO: 153 - DNA, 6202 bp, Homo sapiens
  CDS (169)..(1728)
gaattccggcgtcgcggacgcatcccagtctgggcgggacgctcggccgcggcgaggcgggcaagcctggcagggcagagggagccccggctccgaggttgctcttcgcccccgaggatcagtcttggccccaaagcgcgacgcacaaatccacataacctgaggaccatggatgctgatgagggtcaagacatgtcccaagtttcagggaaggaaagcccccctgtaagcgatactccagatgagggcgatgagcccatgccgatccccgaggacctctccaccacctcgggaggacagcaaagctccaagagtgacagagtcgtggccagtaatgttaaagtagagactcagagtgatgaagagaatgggcgtgcctgtgaaatgaatggggaagaatgtgcggaggatttacgaatgcttgatgcctcgggagagaaaatgaatggctcccacagggaccaaggcagctcggctttgtcgggagttggaggcattcgacttcctaacggaaaactaaagtgtgatatctgtgggatcatttgcatcgggcccaatgtgctcatggttcacaaaagaagccacactggagaacggcccttccagtgcaatcagtgcggggcctcattcacccagaagggcaacctgctccggcacatcaagctgcattccggggagaagcccttcaaatgccacctctgcaactacgcctgccgccggagggacgccctcactggccacctgaggacgcactccgttggtaaacctcacaaatgtggatattgtggccgaagctataaacagcgaagctctttagaggaacataaagagcgctgccacaactacttggaaagcatgggccttccgggcacactgtacccagtcattaaagaagaaactaatcacagtgaaatggcagaagacctgtgcaagataggatcagagagatctctcgtgctggacagactagcaagtaacgtcgccaaacgtaagagctctatgcctcagaaatttcttggggacaagggcctgtccgacacgccctacgacagcagcgccagctacgagaaggagaacgaaatgatgaagtcccacgtgatggaccaagccatcaacaacgccatcaactacctgggggccgagtccctgcgcccgctggtgcagacgcccccgggcggttccgaggtggtcccggtcatcagcccgatgtaccagctgcacaagccgctcgcggagggcaccccgcgctccaaccactcggcccaggacagcgccgtggagaacctgctgctgctctccaaggccaagttggtgccctcggagcgcgaggcgtccccgagcaacagctgccaagactccacggacaccgagagcaacaacgaggagcagcgcagcggtctcatctacctgaccaaccacatcgccccgcacgcgcgcaacgggctgtcgctcaaggaggagcaccgcgcctacgacctgctgcgcgccgcctccgagaactcgcaggacgcgctccgcgtggtcagcaccagcggggagcagatgaaggtgtacaagtgcgaacactgccgggtgctcttcctggatcacgtcatgtacaccatccacatgggctgccacggcttccgtgatccttttgagtgcaacatgtgcggctaccacagccaggaccggtacgagttctcgtcgcacataacgcgaggggagcaccgcttccacatgagctaaagccctcccgcgcccccaccccagaccccgagccaccccaggaaaagcacaaggactgccgccttctcgctcccgccagcagcatagactggactggaccagacaatgttgtgtttggatttgtaactgttttttgttttttgtttgagttggttgattggggtttgatttgcttttgaaaagatttttatttttagaggcagggctgcattgggagcatccagaactgctaccttcctagatgtttccccagaccgctggctgagattccctcacctgtcgcttcctagaatccccttctccaaacgattagtctaaattttcagagagaaatagataaaacacgccacagcctgggaaggagcgtgctctaccctgtgctaagcacggggttcgcgcaccaggtgtctttttccagtccccagaagcagagagcacagcccctgctgtgtgggtctgcaggtgagcagacaggacaggtgtgccgccacccaagtgccaagacacagcagggccaacaacctgtgcccaggccagcttcgagctacatgcatctagggcggagaggctgcacttgtgagagaaaatactatttcaagtcatattctgcgtaggaaaatgaattggttggggaaagtcgtgtctgtcagactgccctgggtggagggagacgccgggctagagcctttgggatcgtcctggattcactggctttgcggaggctgctcagatggcctgagcctcccgaggcttgctgccccgtaggaggagactgtcttcccgtgggcatatctggggagccctgttccccgctttttcactcccatacctttaatggcccccaaaatctgtcactacaatttaaacaccagtcccgaaatttggatcttctttctttttgaatctctcaaacggcaacattcctcagaaaccaaagctttatttcaaatctcttccttccctggctggttccatctagtaccagaggcctcttttcctgaagaaatccaatcctagccctcattttaattatgtacatctgtttgtagccacaagcctgaatttctcagtgttggtaagtttctttacctaccctcactatatattattctcgttttaaaacccataaaggagtgatttagaacagtcattaattttcaactcaatgaaatatgtgaagcccagcatctctgttgctaacacacagagctcacctgtttgaaaccaagctttcaaacatgttgaagctctttactgtaaaggcaagccagcatgtgtgtccacacatacataggatggctggctctgcacctgtaggatattggaatgcacagggcaattgagggactgagccagaccttcggagagtaatgccaccagatcccctaggaaagaggaggcaaatggcactgcaggtgagaaccccgcccatccgtgctatgacatggaggcactgaagcccgaggaaggtgtgtggagattctaatcccaacaagcaagggtctccttcaagattaatgctatcaatcattaaggtcattactctcaaccacctaggcaatgaagaatataccatttcaaatatttacagtacttgtcttcaccaacactgtcccaaggtgaaatgaagcaacagagaggaaattgtacataagtacctcagcatttaatccaaacaggggttcttagtctcagcactatgacattttgggctgactacttatttgttaggcgggagctctcctgtgcattgtaggataattagcagtatccctggtggctacccaatagacgccagtagcaccccgaattgacaacccaaactctccagacatcaccaactgtcccctgcgaggagaaatcactcctgggggagaaccactgacccaaatgaattctaaaccaatcaaatgtctgggaagccctccaagaaaaaaaatagaaaagcacttgaagaatattcccaatattcccggtcagcagtatcaaggctgacttgtgttcatgtggagtcattataaattctataaatcaattattccccttcggtcttaaaaatatatttcctcataaacatttgagttttgttgaaaagatggagtttacaaagataccattcttgagtcatggatttctctgctcacagaagggtgtggcatttggaaacgggaataaacaaaattgctgcaccaatgcactgagtgaaggaagagagacagaggatcaagggctttagacagcactccttcaatatgcaatcacagagaaagatgcgccttatccaagttaatatctctaaggtgagagccttcttagagtcagtttgttgcaaatttcacctactctgttcttttccatccatccccctgagtcagttggttgaagggagttattttttcaagtggaattcaaacaaagctcaaaccagaactgtaaatagtgattgcaggaattcttttctaaactgctttgccctttcctctcactgccttttatagccaatataaatgtctctttgcacaccttttgttgtggttttatattgtaacaccatttttctttgaaactattgtatttaaagtaaggtttcatattatgtcagcaagtaattaacttatgtttaaaaggtggccatatcatgtaccaaaagttgctgaagtttctcttctagctggtaaagtaggagtttgcatgacttcacactttttttgcgtagtttcttctgttgtatgatggcgtgagtgtgtgtcttgggtaccgctgtgtactactgtgtgcctagattccatgcactctcgttgtgtttgaagtaaatattggagaccggagggtaacaggttggcctgttgattacagctagtaatcgctgtgtcttgttccgccccctccctgacaccccagcttcccaggatgtggaaagcctggatctcagctccttgccccatatcccttctgtaatttgtacctaaagagtgtgattatcctaattcaagagtcactaaaactcatcacattatcattgcatatcagcaaagggtaaagtcctagcaccaattgcttcacataccagcatgttccatttccaatttagaattagccacataataaaatcttagaatcttccttgagaaagagctgcctgagatgtagttttgttatatggttccccaccgaccatttttgtgcttttttcttgttttgttttgttttgactgcactgtgagttttgtagtgtcctcttcttgccaaaacaaacgcgagatgaactggacttatgtagacaaatcgtgatgccagtgtatccttcctttcttcagttccagcaataatgaatggtcaacttttttaaaatctagatctctctcattcatttcaatgtatttttactttaagatgaaccaaaattattagacttatttaagatgtacaggcatcagaaaaaagaagcacataatgcttttggtgcgatggcactcactgtgaacatgtgtaaccacatattaatatgcaatattgtttccaatactttctaatacagttttttataatgttgtgtgtggtgattgttcaggtcgaatctgttgtatccagtacagctttaggtcttcagctgcccttctggcgagtacatgcacaggattgtaaatgagaaatgcagtcatatttccagtctgcctctatgatgatgttaaattattgctgtttagctgtgaacaagggatgtaccactggaggaatagagtatccttttgtacacattttgaaatgcttcttctgtagtgatagaacaaataaatgcaacgaatactctgtctgccctatcccgtgaagtccacactggcgtaagagaaggcccagcagagcaggaatctgcctagactttctcccaatgagatcccaatatgagagggagaagagatgggcctcaggacagctgcaataccacttgggaacacatgtggtgtcttgatgtggccagcgcagcagttcagcacaacgtacctcccatctacaacagtgctggacgtgggaattctaagtcccagtcttgagggtgggtggagatggagggcaacaagagatacatttccagttctccactgcagcatgcttcagtcattctgtgagtggccgggcccagggccctcacaatttcactaccttgtcttttacatagtcataagaattatcctcaacatagccttttgacgctgtaaatcttgagtattcatttacccttttctgatctcctggaaacagctgcctgcctgcattgcacttctcttcccgaggagtggggtaaatttaaaagtcaagttatagtttggatgttagtatagaattttgaaattgggaattaaaaatcaggactggggactgggagaccaaaaatttctgatcccatttctgatggatgtgtcacaccttttctgtcaaaataaaatgtcttggaggttatgactccttggtgaaa

SEQ ID NO: 154 - protein, 519 aa, Homo sapiens
MDADEGQDMSQVSGKESPPVSDTPDEGDEPMPIPEDLSTTSGGQQSSKSDRVVASNVKVETQSDEENGRACEMNGEECAEDLRMLDASGEKMNGSHRDQGSSALSGVGGIRLPNGKLKCDICGIICIGPNVLMVHKRSHTGERPFQCNQCGASFTQKGNLLRHIKLHSGEKPFKCHLCNYACRRRDALTGHLRTHSVGKPHKCGYCGRSYKQRSSLEEHKERCHNYLESMGLPGTLYPVIKEETNHSEMAEDLCKIGSERSLVLDRLASNVAKRKSSMPQKFLGDKGLSDTPYDSSASYEKENEMMKSHVMDQAINNAINYLGAESLRPLVQTPPGGSEVVPVISPMYQLHKPLAEGTPRSNHSAQDSAVENLLLLSKAKLVPSEREASPSNSCQDSTDTESNNEEQRSGLIYLTNHIAPHARNGLSLKEEHRAYDLLRAASENSQDALRVVSTSGEQMKVYKCEHCRVLFLDHVMYTIHMGCHGFRDPFECNMCGYHSQDRYEFSSHITRGEHRFHMS

SEQ ID NO: 155 - DNA, 18883 bp, Homo sapiens
  CDS (388)..(15996)
tgtttgctctgcagaatactttacctgggcacccaagtcttccttccagcattcctgctgctacagcctatttgctgagtaaccaggggttacagcagcgttgccaggcaacgagggacagcggtcctgttgaagagccatttgtcacactgaggggactggttgaaatgcaataaagaaatgataccagcagctactcatgtcttcgccattgctaagaacgtcgttggtattaccttactctgagaacgtgtctgcagtttccagaaaatggagtatcgcaacatcacttaaagtaccctgcttcaaagtattgctggcaagtggcgtgggcctgattatttatttagaaatgctttatcaggaggagaatgcttttttgtaaacatgaattgcccagttctttcattgggctctggcttcttgtttcaggtcattgaaatgttgatctttgcctattttgcttcaatatccttgactgagtcacgaggtcttttcccaaggctggagaacgtgggagctttcaagaaagtttccatcgtgccaacccaagcagtatgtggactcccagaccgaagcactttttgtcacagctctgctgctgctgaaagtattcagttctgtacccagcggttttgtattcaggattgcccatacagatcttcacaccctacctacactgcccttttctcagcaggcctcagtagctgcatcacaccagacaagaatgatctgcatcctaacgcccatagcaattctgcaagttttatttttggaaatcacaagagctgcttttcttctcctccttctccaaagctgatggcatcatttaccttagctgtatggctgaaacctgagcaacaaggtgtaatgtgtgttatagaaaagacagtagatgggcagattgtgttcaaacttacaatatctgagaaagagaccatgttttattatcgcacagtaaatggtttgcaacctccaataaaagtaatgacactggggagaattcttgtgaagaaatggattcatcttagtgtgcaggtgcatcagacaaaaatcagcttctttatcaatggcgtggagaaggatcatacacctttcaatgcaagaactctaagtggttcaattacagattttgcatctggtactgtgcaaataggacagagtttaaatggtttagagcagtttgtcggaagaatgcaagattttcgattataccaagtggcacttacaaacagagagattctggaagtcttctctggagatcttctcagattgcatgcccaatcacattgccgttgccctggcagccacccgcgggtccaccctttggcacagcggtactgcattcctaatgatgcaggagacacagctgataatagagtgtcacggttgaatcctgaagcccatcctctctcttttgtcaatgataatgatgttggtacttcatgggtttcaaatgtgtttacaaacattacacagcttaatcaaggagtgactatttcagttgatttggaaaatggacagtatcaggtgttttatattatcattcagttctttagtccacaaccaacggaaataaggattcaaaggaagaaggaaaatagtttagattgggaggactggcaatattttgccaggaattgtggtgcttttggaatgaaaaacaatggagatttggaaaaacctgattctgtcaactgtcttcagctttccaattttactccatattcccgtggcaatgtcacatttagcatcctgacacctggaccaaattatcgtcctggatacaataacttctataataccccatctcttcaagagttcgtaaaagccacgcaaataaggtttcattttcatgggcagtactatacaactgagactgctgttaacctcagacacagatattatgcagtggacgaaatcaccattagtgggagatgtcagtgccatggtcatgccgataactgcgacacaacaagccagccatatagatgcctctgctcccaggagagcttcactgaaggacttcattgtgatcgctgcttgcctctttataatgacaagcctttccgccaaggtgatcaagtttacgctttcaattgtaaaccttgtcaatgcaacagccattccaaaagctgccattacaacatctctgtagacccatttccttttgagcacttcagagggggaggaggagtttgtgatgattgtgagcataacactacaggaaggaactgtgagctgtgcaaggattactttttccgacaagttggtgcagatccttcggccatagatgtttgcaaaccctgtgactgtgatacagttggcactagaaatggtagcattctttgtgatcagattggaggacagtgtaattgtaagagacacgtgtctggcaggcagtgcaatcagtgccagaatggattctacaatctacaagagttggatcctgatggctgcagtccctgtaactgcaatacctctgggacagtggatggagatattacctgtcaccaaaattcaggccagtgcaagtgcaaagcaaacgttattgggcttaggtgtgatcattgcaattttggatttaaatttctccgaagctttaatgatgttggatgtgagccctgccagtgtaacctccatggctcagtgaacaaattctgcaatcctcactctgggcagtgtgagtgcaaaaaagaagccaaaggacttcagtgtgacacctgcagagaaaacttttatgggttagatgtcaccaattgtaaggcctgtgactgtgacacagctggatccctccctgggactgtctgtaatgctaagacagggcagtgcatctgcaagcccaatgttgaagggagacagtgcaataaatgtttggagggaaacttctacctacggcaaaataattctttcctctgtctgccttgcaactgtgataagactgggacaataaatggctctctgctgtgtaacaaatcaacaggacaatgtccttgcaaattaggggtaacaggtcttcgctgtaatcagtgtgagcctcacaggtacaatttgaccattgacaattttcaacactgccagatgtgtgagtgtgattccttggggacattacctgggaccatttgtgacccaatcagtggccagtgcctgtgtgtgcctaatcgtcaaggaagaaggtgtaatcagtgtcaaccaggtttttatatttctccaggcaatgccactggctgcctgccatgctcatgccatacaactggtgcagttaatcacatctgtaatagcctgactggtcagtgtgtttgccaagatgcttccattgctgggcaacgttgtgaccaatgcaaagaccattactttggatttgatcctcagactggaagatgtcagccttgtaattgtcatctctcaggagccttgaatgaaacctgtcacttggtcacaggccagtgtttctgtaaacaatttgtcactggctcaaagtgtgatgcttgtgttcccagtgcaagccacttggatgtcaacaatctattgggttgcagcaaaactccattccagcaacctccgcccagaggacaagttcaaagttcttctgctatcaatctctcctggagtccacctgattctccaaatgcccactggcttacttacagtttactcagggatggttttgaaatctacacaacagaggatcaatacccatacagtattcaatacttcttagacacagacctgttaccatataccaaatattcctattacattgagaccaccaatgtgcatggttcaacaaggagtgtagctgtcacttacaagacaaaaccaggggtcccagagggaaacttgactttaagttatatcattcctattggctcagactctgtgacacttacctggacaacactctcaaatcaatctggtcccatagagaaatatattttgtcctgtgcccctttggctggtggtcagccatgtgtttcctacgaaggtcatgaaacctcagctaccatctggaatctggttccatttgccaagtacgatttttctgtacaggcgtgtactagcgggggctgtttacacagcttgcccattacagtgaccacagcccaggcccctccccaaagactaagtccacctaagatgcagaaaatcagttctacagaacttcatgtagaatggtctccaccagcggaactaaatggaataattataagatatgaactatacatgagaagactgagatctactaaagaaaccacatctgaggaaagtcgagtttttcagagcagtggttggctcagtcctcattcatttgtagaatcggccaatgaaaatgcattaaaacctcctcaaacaatgacaaccatcactggcttggagccatacaccaagtatgagttcagagtcttagctgtgaatatggctggaagtgtgtcttctgcctgggtctcagaaagaacgggagaatcagcacctgtattcatgatccctccttcagtctttcccctctcttcgtactctctcaatatctcctgggagaagccagcagataatgttacaagaggaaaagttgtggggtatgacatcaatatgctttctgaacaatcacctcaacagtctattcccatggcgttttcacagctgttgcacactgctaaatcccaagaactatcttacactgtagaaggactgaaaccttataggatatatgagtttactattactctctgcaattcagttggttgtgtgaccagtgcttcgggagcaggacaaactttagcagcagcaccagcacaactgaggccacctctggttaaaggaatcaacagcacaacaatccatcttaagtggtttccacctgaagaactgaatggaccctctcctatatatcagctggaaaggagagagtcatctctaccagctctgatgaccacgatgatgaaaggaatccgtttcataggaaatgggtattgtaaatttcccagctccactcacccagtcaatacagacttcactggcattaaggccagctttcgaacaaaagtgcctgaaggtttgattgtctttgcagcatcacctggcaatcaggaagagtattttgcacttcagttgaagaagggacgtctttattttctttttgatcctcaggggtcaccagtggaagtaactacaactaatgatcatggcaaacaatatagtgatggaaaatggcatgaaataattgctattaggcatcaggcttttggccaaatcactctggatgggatatatacaggttcctctgccatcctgaatggtagtactgttattggagataacacaggagtctttctgggagggctcccgcgaagttataccatcctcaggaaggatcctgagataatccaaaaaggttttgtgggctgtctcaaggatgtacattttatgaagaattacaatccgtcagctatttgggaacctctggattggcagagttctgaagaacaaatcaacgtgtataacagctgggagggatgtcccgcttcattaaatgagggagctcagttcctaggagcagggttcctggaacttcatccatatatgtttcatggtggaatgaactttgagatttcctttaagttcagaactgaccaattaaatggattgcttcttttcgtttataacaaagatggacctgattttcttgctatggagctgaaaagtggaatattgaccttccggttaaataccagtcttgcctttacacaagtggatctattgctggggctatcctattgtaatggaaagtggaataaagtcattattaaaaaggaaggctctttcatatcagcaagtgtgaatggactgatgaagcatgcatcggagtccggagaccagccactggtggtgaattcaccagtttatgtgggaggaatcccacaggaactgctgaactcttatcaacatttgtgtttggaacaaggtttcggtggttgcatgaaggatgttaaatttacacggggtgctgtcgttaacttggcatctgtgtccagcggtgctgtcagagtcaatctggatggatgcctatcaactgacagtgctgttaactgcaggggaaatgactccatcctggtttaccagggaaaagagcagagtgtttacgagggtggtctccagccttttacagaatacctgtatcgagtgatagcctcgcatgaaggaggttcagtatatagtgattggagtcgaggacgtacaacaggagcagctccacaaagtgtgccaactccctcaagagtccgcagcttaaatggatacagcattgaggtgacctgggatgaacctgttgtcagaggtgtaattgagaagtacattctgaaagcctatagtgaggacagcacccgtccaccccgcatgccctctgccagtgctgaatttgtcaatacaagcaacctcacaggcatattgacaggcttgctacccttcaaaaactatgcagtaaccctaactgcttgcactttggctggctgtactgagagctcacatgcattgaacatctctactccacaagaagccccacaagaggttcagccaccagtagccaaatcccttcccagttctttgctgctctcctggaacccacccaaaaaggcaaatggtattataactcagtactgtttatacatggatgggaggctgatctattcaggcagtgaggagaactacacagtcacagatttagcagtatttacaccccaccagtttctactaagtgcatgcacacatgtgggctgtacaaacagttcctgggtcctactgtacacagcacagctgccaccagaacacgtggattccccagttctgactgtcctggattctagaactatacacatacagtggaaacaaccaagaaaaataagtgggattctggaacgctatgtattatatatgtcaaaccatacacatgattttacaatttggagtgtcatctataacagtacagaacttttccaggatcatatgctacaatacgttttacctggtaataaatatctcatcaagctgggagcttgcacaggtggtgggtgcacagtgagtgaggccagtgaggccctaactgacgaggacatacccgaaggcgtgccagcccccaaagcccactcatattcacctgactcctttaatgtctcctggactgagcctgaatatccgaatggtgttatcacgagttatggattatatctagatggtatattaatccacaattcctcagaactcagctatcgtgcttacggatttgctccttggagtttacattccttcagagtccaagcatgcacggccaaaggttgtgctctgggcccactggtggaaaatcgaactctagaagctcctcctgaaggaacagtaaatgtgtttgtcaaaacacagggatcccggaaagcccacgtgaggtgggaagcaccttttcgccctaatggactcttaacacactcagtccttttcactgggatattctatgtagacccagtaggtaataactacacccttctgaatgtcacaaaagtcatgtacagcggagaagagacaaacctttgggtgctcatcgatgggctggttccttttaccaactatactgtacaagtgaatatttcaaatagccaaggcagcttgataactgatcctataacaattgcaatgcctccaggagctccagatggcgtgctgcctcccaggctttcatctgccactccaaccagtcttcaggttgtctggtctacaccagctcgtaataacgctcctggctctcccagataccaactccagatgaggtctggcgactccacccatggatttctagagttattttccaatccttctgcatcgttaagctatgaagtgagtgatctccaaccgtacacagagtatatgtttcggttggttgcctccaatggatttggcagtgcacatagttcttggattccattcatgaccgcagaggacaaacctggacctgtagttcctccgattcttctggatgtgaagtcaagaatgatgttggtcacctggcagcatcctagaaaatccaatggggttattacccattataacatttatctacatggccgtctatacttgagaactcctggaaatgtcactaattgcacagtgatgcatttacacccatacactgcctataagtttcaggtagaagcctgcacttcaaaaggatgttccctttcaccagagtcccagactgtatggacactcccaggggcaccggaagggatcccaagtccagagctgttctctgatactccaacatctgtgattatatcttggcaaccccctacccaccccaatggcttggtggagaatttcacaattgagagaagagtcaaaggaaaggaagaagttactaccctggtgactctcccgaggagtcattccatgaggtttattgacaagacttctgctcttagcccatggacaaaatatgaatatcgggtactgatgagcactcttcatggaggcacaaacagcagtgcttgggtagaagttaccacaagaccctcacgacctgctggggtgcagccacctgtggtgacagtgctggaacccgatgcagtccaggtcacttggaaacccccactcatccagaacggagacatacttagctatgagattcacatgcctgaccctcacatcactttaaccaatgtgacttccgcagtgttaagtcaaaaagttactcatctgattcctttcactaattattctgtcaccattgttgcttgctcagggggtaatgggtaccttggagggtgcacagagagtttacctacctatgttaccactcaccccaccgtacctcagaatgttggcccattgtctgtgattccactaagtgaatcatatgttgtgatttcttggcaaccaccatccaagccaaatggacctaatttgagatatgagcttctgagacgtaaaatccagcagccacttgcatcaaatcccccagaagatttaaatcggtggcacaatatttattcaggaactcagtggctttatgaagataagggtcttagcaggtttacaacctatgaatatatgctcttcgtacacaacagtgtgggttttacaccgagccgagaagtgactgtgacaacgttagctggtcttccagagagaggagccaatctcactgcgagtgtccttaaccacacagccatcgacgtgaggtgggctaaaccaactgttcaagacctacaaggtgaagttgaatattacacacttttttggagttctgctacctcaaacgactctctaaaaatcttgccagatgtaaactctcatgtcattggccacctaaagccaaacacagagtattggatctttatctctgtcttcaatggagtccacagcatcaacagtgcaggacttcatgcaaccacttgcgatggggagcctcagggcatgcttcctccagaggttgtcatcatcaacagtacagctgtacgtgtcatctggacatctccttcaaacccaaatggtgttgtcactgagtattctatctatgtaaataataagctctacaagactggaatgaatgtgcctgggtcgtttattctgagagacctgtctcccttcactatctatgacattcaggttgaagtctgcacaatatatgcctgcgtgaaaagcaatggaacccaaattaccactgtggaagacactccaagtgatataccaacacccacaattcgtggcatcacttcaagatctcttcaaattgattgggtgtctccacggaagccaaatggcatcattcttggatatgatctcctatggaaaacatggtatccatgcgctaaaactcaaaagttagtgcaggatcagagtgatgagctctgcaaggcagtgaggtgtcaaaaacctgaatctatctgtggacacatttgctattcttctgaagctaaggtttgttgtaacggagtgctctataaccccaagcctggacatcgctgttgtgaagaaaagtatatcccgtttgttctgaattctactggagtttgttgtggtggccgaatacaggaggcacaaccaaatcatcagtgctgctctgggtattacgctagaattctaccaggtgaagtatgctgtccagatgaacagcacaatcgggtttctgttggcattggtgattcctgctgtggcagaatgccgtactccacctcaggaaaccagatttgctgtgctgggaggcttcatgatggccatggccagaagtgctgtggcagacagattgtgagcaacgatttagagtgttgtggtggagaagaaggagtggtgtacaatcgccttccaggtatgttctgttgtgggcaggattatgtgaatatgtcagataccatatgctgctcagcttccagtggagagtctaaagcacatattaaaaagaatgacccggtgccagtaaaatgctgtgagactgaacttattccaaagagccagaaatgctgtaatggagttggatataatcctttgaaatatgtttgctctgacaagatttcaactggaatgatgatgaaggaaaccaaagagtgcaggatcctctgcccagcatctatggaagccacagaacattgtggcaggtgtgacttcaactttaccagccacatttgcactgtgataagagggtctcacaattccacagggaaggcatcaattgaagaaatgtgttcatctgccgaagaaaccattcatacagggagtgtaaacacgtactcttacacagatgtgaacctcaagccctacatgacatatgagtacaggatttctgcctggaacagctatgggcgaggactcagcaaagctgtgagagccagaacaaaagaagatgtgcctcaaggagtgagtccccctacgtggaccaaaatagacaatcttgaagatacaattgtcttaaactggagaaaacctatacaatcaaatggtcctattatttactacatccttcttcgaaatggaattgaacgttttcggggaacatcactgagcttctctgataaagagggaattcaaccatttcaggaatattcatatcagctgaaagcttgcacggttgctggctgtgccaccagtagcaaggtagttgcagctactacccaaggagttccggagagcatcctgccaccaagcatcacagccctaagtgcagtggctctgcatctgagctggagtgtccctgagaaatcaaacggcgtcattaaagagtaccagatcaggcaggttgggaaaggtctcatccacactgacaccactgacaggagacagcatacggtcacaggtctccagccatacaccaactacagcttcactcttacagcttgtacatctgctgggtgcacttcaagcgagccttttctaggtcagacactgcaggcagctcctgaaggagtttgggtgacacctcgacacattatcatcaattctacaacagtggaattatattggagtctgccagaaaagcccaatggcctcgtttctcaatatcaattgagtcgtaatggaaacttgcttttcctgggtggcagtgaggagcagaatttcactgataaaaacctggagcccaatagcagatacacttacaagttagaagtcaaaactggaggtggcagcagtgctagtgatgattacattgttcaaacacctatgtcaacaccagaagaaatctatcctccatataatatcacagtaattgggccttattctatatttgtagcttggataccaccagggatcctcatccccgaaattcctgtggagtacaatgtcttactcaatgatggaagtgtaacacctctggccttctccgttggtcatcatcaatccacccttctggaaaatttgactccattcacacagtatgagataaggatacaagcatgtcaaaatggaagttgtggagttagcagtaggatgtttgtcaaaacacctgaagcagccccaatggatcttaattctcctgttcttaaggcactggggtcagcttgcatagagattaagtggatgccacctgaaaaaccaaatggaatcatcatcaactactttatttacagacgccctgctggcattgaagaggagtctgttttatttgtctggtcagaaggagcccttgaatttatggatgaaggagacaccctgaggcctttcacactctacgaatatcgggtcagagcctgtaactccaagggttcagtggagagtctgtggtcattaacacaaactctggaagctccacctcaagattttccagctccttgggctcaagccacgagtgctcattcagttctgttgaattggacaaagccagaatctcccaatggcattatctcccattaccgtgtggtctaccaggagagacccgacgatcctacatttaacagccctaccgtgcatgctttcacagtgaagggaacaagccatcaagcccacctgtacgggttagaaccattcacaacatatcgcattggtgttgtggctgcaaaccatgcaggagaaattttaagcccttggactctgattcaaaccttagaatcttccccaagtggactgagaaactttatagtagaacagaaagagaatggccgggcattgctactacagtggtcagaacctatgagaaccaatggtgtgattaagacatacaacatcttcagtgacgggttcctggagtactctggtttgaatcgtcagtttctcttccgccgcctggatcctttcactctctacacactgaccctggaggcctgcaccagagcaggttgtgcacactcggcgcctcagcctctgtggacagatgaagcccctccagactctcagctggctcctactgtccactctgtgaagtccaccagtgttgagctgagctggtctgagcctgttaacccaaatggaaaaataattcgctatgaagtgattcgcagatgcttcgagggaaaagcttggggaaatcagacgatccaggccgacgagaaaattgttttcacagaatataacactgaaaggaatacatttatgtataatgacacaggtttgcaaccatggacgcagtgtgaatataaaatctacacttggaattcagctgggcatacctgtagctcttggaatgtggtgaggacattgcaagcacctccagaaggtctctctccacctgtgatatcctatgtttctatgaatccccaaaaactgctgatttcctggatcccaccagaacagtctaatggtattatccagtcctataggcttcaaaggaatgaaatgctctatccttttagctttgatcctgtgactttcaattacactgatgaagagcttcttcctttttccacctatagctatgcactccaagcctgcacgagtggaggatgctccaccagcaaacccaccagcatcacaactctggaggctgctccatcagaagtcagccctccagatctttgggccgtcagtgccactcaaatgaatgtatgttggtcaccgcccacagtgcaaaatggaaagattactaaatatttagttagatatgataataaagagtcccttgctggccagggcctgtgcctgctggtttcccacctgcagccttactctcagtataacttctcccttgtagcctgcacgaatggaggttgcacagctagtgtgtcaaaatctgcctggacaatggaggccctgccagagaacatggactctccaacattgcaagtcacaggctcagaatcaatagaaatcacctggaaacctccaagaaacccaaatggccagatcagaagttatgaacttaggagggatggaaccattgtatatacaggcttggaaacacgctatcgtgattttactctcaccccaggtgtggagtatagctacacagtaactgccagcaacagccaagggggtattttgagtcctcttgtcaaagatcgaaccagcccctcagcaccctcagggatggaacctccaaaattgcaggccaggggtcctcaggagatcttagtgaactgggaccctccagtgagaacaaatggtgatatcatcaattataccctcttcatccgtgaactatttgaaagagaaactaaaatcatacacataaacacaactcataattcttttggtatgcagtcatatatagtaaaccagctgaagccatttcacaggtatgaaatacgaattcaagcgtgcaccaccctgggatgtgcatcaagtgactggacattcatacagacccctgagattgcacctttgatgcaaccccctccacatctggaggtacaaatggctccaggaggattccagccaactgtttctcttttgtggacaggaccgctgcagccaaatggaaaagttttgtattacgaattatacagaagacaaatagcaactcagcctagaaaatccaatccagtcctaatctataacggaagctcaacatcttttatagattccgaactattgcctttcacagagtatgagtatcaggtctgggcagtgaattctgcaggaaaagcccccagtagctggacatggtgcagaaccgggccagccccaccagaaggtctcagagcccccacgttccatgtgatctcttctacccaagcagtggtcaacatcagtgcccctgggaagcccaacgggatcgtcagtctctacaggctgttctccagcagcgcccatggggctgagacagtgctatccgaaggcatggccacccagcagactctccatggccttcaagccttcactaactactctattggagtagaggcctgcacctgcttcaactgttgcagcaaaggaccgacagctgaactgagaacccatcctgccccaccctcaggactgtcctctccacaaatcgggacgctggcctcaaggacggcctccttccggtggagtccccccatgttccccaatggtgtcattcacagctatgaactccaattccacgtggcttgccctcctgactcagccctcccctgtactcccagccaaatagaaacaaagtacacggggctggggcagaaagccagccttgggggtctccagccctacaccacatacaagctgagagtggtggcacacaacgaggtgggcagtacggcttccgagtggatcagtttcaccacccaaaaagaattgcctcagtaccgagccccattttcggtggacagcaatttgtctgtggtgtgtgtgaactggagtgacaccttcctcctgaacggccaactgaaggagtacgtgttaaccgacggagggcgacgcgtgtacagcggcttggacaccaccctctacataccgagaacggcggacaaaaccttctttttccaggtcatctgcacgactgacgaaggaagtgttaagacgccgttgatccaatatgatacctctactggacttggcttggtcctaacaactcctgggaaaaagaagggatcgcggagcaaaagcacagagttctacagcgagctgtggttcatagtgttaatggcgatgctgggcttgatcttgttggccatttttctgtccctgatactacaaagaaaaatccacaaagagccatatatcagagaaagacctcccttggtacctcttcagaagaggatgtctccattgaatgtttacccaccgggggaaaaccatatggggttagccgataccaaaattccccggtctgggacacctgtgagtatccgcagcaaccggagtgcatgtgtcctgcgcatcccgagtcaaaaccaaaccagcctaacctactcccagggttctcttcaccgcagcgtcagccagctcatggacattcaagacaagaaagtcttgatggacaactcactgtgggaagccatcatgggccacaacagtggactgtatgtggatgaagaggacctgatgaacgccatcaaggatttcagctcagtgactaaggaacgcaccacattcacagacacccacctgtaaaggatggaaacccagaagacgtaaccctggaatgcaaggtctgcacccatttcctcctgggttatcactcacacatcataaatgctgaaaagccattgtttattatcctataattctttaaagaaatgatgactgtttttgaaagtgttccttcctaatagaggtctaagaaatgatatttttctcatcttaaatgagagagaatattcatatgaaaatacttgatttgctcttattttgtagaagacaaagaagtatgtaattgtcacttggttctgtttggcagtgatgctcctggttaactgaataatcagtggcaatttcaagatggctcacagttgttagaagtagtaagttagttactggctcaaaaatgattctgttgaaaggatgtcactgctgttcatttctatctgccatttctgtcagggttgacacaatcctgcaagaatagttattctaatgatcacagctgctaaatgaatcccaaactttgcaccaggtcgacaaacttttctgaaggttctatttatttaccatacatagggttacttaccaaactttttgacaaggctgaaggttctatttatttacaatacatagggttactcaccaaactttttgacaaggcaacacataacttacacataaatgtctctgttcttgcatttatgaattttccaaaaatctaaggagtaaacagcttatttatacattttgaggagaaaacaaagtgtttcactaggaacacctctacttgaaccaatgtttttatttcatatattttatagttttgaaactagtttctcataaaattctgtcaattcactgaatatcagagaatactgacatcttcaacctagcacatttcaaatggaaactactgttctatttgcaatattaggctgcgtgaaattttaaaaggaaaaatgtatctgttccttctagcattaacatatatacatgtagagacaagactatacctatgtgtatatatatgtatatcatgtatatattactctgcactatatcccttctttttggagaactagccattattttagccacagaatcagtaagaacagatgatatgcaacagtaccaattacggttcaaaaatgtctgtcacctgctctagttggattacaaagtcattggtgaaagtcctatggcaagaaaaattttcttgcaaatcatccacataaaatcagatatttaaatttgttcttcatggaaaacagagtaagaaaacctcttgtcttccttcatccttaaaggtctttgtgaccccaggaaaatattgactctgtctaacacacaatagtcacaatactttttgtgaatctacaaccagagacaggcaaaaacttgtaaagtaagggatagtcttacttattctgcctgaaaacaatgtattaccccagggcccaacagtaaaagattgtggactttttgggtattgagatttcatctagctctgtgagagagcagctcctcagactgaccaactcctagacaaagtttgccaaccataagtgtcaaaagcacaggccagtattaagcagaagttctaccaccttattagaactgctataaacaaaagcatctgaaataattgtgcacatctggcagtgactgtagaaaatacgaaatatatatttctcgccaagtttttatactttctgaaatgaaaacataggattgactagtttactggtttttattcccatatgccgattctgggacaataaagttgtttaaagctggcacaaataagcattaaccaaggctgtgtccaccttctgtgagctacttaaggtatataggaaaggagtggtcacaaacttgcatcctaatccttggtggactcttctaagaatacagtttgctagtcacaaagaatagtctacaaatatgctttgctaggttcagaagattgagtttatcctgatttttgaaaaattaaccaggtatctttatcactgtgtatttttccaagcacagtataaaattttaacaacgcacaaaaaaatacagaactgcaggggattttatcttggatcattatccatttaatcatctaattagacatgaactcagttagctgaatcatttacattttgactccatagcttagggcagacagaagcctgtatggcttctgcccagaactctgtcccctgctacatgtctaagtttacttgtatttatttcagagaagaactctaagatgttgctttgctactttaagtggtattgcgtgccaagcctctattatacaaaccatgcagactcgcctctagagattctgattcggttgatctggggtgtgtggctgaggcatcagtactttttaaagcttccaggtgttctaatgttgagacccactgatgttccacaatctggaagaaatcatgtacaggaataatatgctatgcacagggactatgctccttggctcaccccttctcccttataaacaatgagcagttcttgatgaacctctttaaatttaaatctcctgactcacattttaccaattgtacatgccacattctcagcttacgaactaccatgttttgttattcttaatatcaactgtttggtaagagtacagttgtttttatacactctaagaaatgtgtttataatctactgtaatttccactaaatggaacccaaatattaatgttatggtaccatatactgatgtaaaaatcatgctggcatccatgaacacaccggtaaataaaacatagtccaagtggaagaattcattaataaggaacttttaattatgtcacaaatgaatagttggtttccaatgcacaaatatcatgtaaactaatctaaagatggtttgcttaataaatatttgaatgtgacc

SEQ ID NO: 156 - protein, 5202 aa, Homo sapiens
MNCPVLSLGSGFLFQVIEMLIFAYFASISLTESRGLFPRLENVGAFKKVSIVPTQAVCGLPDRSTFCHSSAAAESIQFCTQRFCIQDCPYRSSHPTYTALFSAGLSSCITPDKNDLHPNAHSNSASFIFGNHKSCFSSPPSPKLMASFTLAVWLKPEQQGVMCVIEKTVDGQIVFKLTISEKETMFYYRTVNGLQPPIKVMTLGRILVKKWIHLSVQVHQTKISFFINGVEKDHTPFNARTLSGSITDFASGTVQIGQSLNGLEQFVGRMQDFRLYQVALTNREILEVFSGDLLRLHAQSHCRCPGSHPRVHPLAQRYCIPNDAGDTADNRVSRLNPEAHPLSFVNDNDVGTSWVSNVFTNITQLNQGVTISVDLENGQYQVFYIIIQFFSPQPTEIRIQRKKENSLDWEDWQYFARNCGAFGMKNNGDLEKPDSVNCLQLSNFTPYSRGNVTFSILTPGPNYRPGYNNFYNTPSLQEFVKATQIRFHFHGQYYTTETAVNLRHRYYAVDEITISGRCQCHGHADNCDTTSQPYRCLCSQESFTEGLHCDRCLPLYNDKPFRQGDQVYAFNCKPCQCNSHSKSCHYNISVDPFPFEHFRGGGGVCDDCEHNTTGRNCELCKDYFFRQVGADPSAIDVCKPCDCDTVGTRNGSILCDQIGGQCNCKRHVSGRQCNQCQNGFYNLQELDPDGCSPCNCNTSGTVDGDITCHQNSGQCKCKANVIGLRCDHCNFGFKFLRSFNDVGCEPCQCNLHGSVNKFCNPHSGQCECKKEAKGLQCDTCRENFYGLDVTNCKACDCDTAGSLPGTVCNAKTGQCICKPNVEGRQCNKCLEGNFYLRQNNSFLCLPCNCDKTGTINGSLLCNKSTGQCPCKLGVTGLRCNQCEPHRYNLTIDNFQHCQMCECDSLGTLPGTICDPISGQCLCVPNRQGRRCNQCQPGFYISPGNATGCLPCSCHTTGAVNHICNSLTGQCVCQDASIAGQRCDQCKDHYFGFDPQTGRCQPCNCHLSGALNETCHLVTGQCFCKQFVTGSKCDACVPSASHLDVNNLLGCSKTPFQQPPPRGQVQSSSAINLSWSPPDSPNAHWLTYSLLRDGFEIYTTEDQYPYSIQYFLDTDLLPYTKYSYYIETTNVHGSTRSVAVTYKTKPGVPEGNLTLSYIIPIGSDSVTLTWTTLSNQSGPIEKYILSCAPLAGGQPCVSYEGHETSATIWNLVPFAKYDFSVQACTSGGCLHSLPITVTTAQAPPQRLSPPKMQKISSTELHVEWSPPAELNGIIIRYELYMRRLRSTKETTSEESRVFQSSGWLSPHSFVESANENALKPPQTMTTITGLEPYTKYEFRVLAVNMAGSVSSAWVSERTGESAPVFMIPPSVFPLSSYSLNISWEKPADNVTRGKVVGYDINMLSEQSPQQSIPMAFSQLLHTAKSQELSYTVEGLKPYRIYEFTITLCNSVGCVTSASGAGQTLAAAPAQLRPPLVKGINSTTIHLKWFPPEELNGPSPIYQLERRESSLPALMTTMMKGIRFIGNGYCKFPSSTHPVNTDFTGIKASFRTKVPEGLIVFAASPGNQEEYFALQLKKGRLYFLFDPQGSPVEVTTTNDHGKQYSDGKWHEIIAIRHQAFGQITLDGIYTGSSAILNGSTVIGDNTGVFLGGLPRSYTILRKDPEIIQKGFVGCLKDVHFMKNYNPSAIWEPLDWQSSEEQINVYNSWEGCPASLNEGAQFLGAGFLELHPYMFHGGMNFEISFKFRTDQLNGLLLFVYNKDGPDFLAMELKSGILTFRLNTSLAFTQVDLLLGLSYCNGKWNKVIIKKEGSFISASVNGLMKHASESGDQPLVVNSPVYVGGIPQELLNSYQHLCLEQGFGGCMKDVKFTRGAVVNLASVSSGAVRVNLDGCLSTDSAVNCRGNDSILVYQGKEQSVYEGGLQPFTEYLYRVIASHEGGSVYSDWSRGRTTGAAPQSVPTPSRVRSLNGYSIEVTWDEPVVRGVIEKYILKAYSEDSTRPPRMPSASAEFVNTSNLTGILTGLLPFKNYAVTLTACTLAGCTESSHALNISTPQEAPQEVQPPVAKSLPSSLLLSWNPPKKANGIITQYCLYMDGRLIYSGSEENYTVTDLAVFTPHQFLLSACTHVGCTNSSWVLLYTAQLPPEHVDSPVLTVLDSRTIHIQWKQPRKISGILERYVLYMSNHTHDFTIWSVIYNSTELFQDHMLQYVLPGNKYLIKLGACTGGGCTVSEASEALTDEDIPEGVPAPKAHSYSPDSFNVSWTEPEYPNGVITSYGLYLDGILIHNSSELSYRAYGFAPWSLHSFRVQACTAKGCALGPLVENRTLEAPPEGTVNVFVKTQGSRKAHVRWEAPFRPNGLLTHSVLFTGIFYVDPVGNNYTLLNVTKVMYSGEETNLWVLIDGLVPFTNYTVQVNISNSQGSLITDPITIAMPPGAPDGVLPPRLSSATPTSLQVVWSTPARNNAPGSPRYQLQMRSGDSTHGFLELFSNPSASLSYEVSDLQPYTEYMFRLVASNGFGSAHSSWIPFMTAEDKPGPVVPPILLDVKSRMMLVTWQHPRKSNGVITHYNIYLHGRLYLRTPGNVTNCTVMHLHPYTAYKFQVEACTSKGCSLSPESQTVWTLPGAPEGIPSPELFSDTPTSVIISWQPPTHPNGLVENFTIERRVKGKEEVTTLVTLPRSHSMRFIDKTSALSPWTKYEYRVLMSTLHGGTNSSAWVEVTTRPSRPAGVQPPVVTVLEPDAVQVTWKPPLIQNGDILSYEIHMPDPHITLTNVTSAVLSQKVTHLIPFTNYSVTIVACSGGNGYLGGCTESLPTYVTTHPTVPQNVGPLSVIPLSESYVVISWQPPSKPNGPNLRYELLRRKIQQPLASNPPEDLNRWHNIYSGTQWLYEDKGLSRFTTYEYMLFVHNSVGFTPSREVTVTTLAGLPERGANLTASVLNHTAIDVRWAKPTVQDLQGEVEYYTLFWSSATSNDSLKILPDVNSHVIGHLKPNTEYWIFISVFNGVHSINSAGLHATTCDGEPQGMLPPEVVIINSTAVRVIWTSPSNPNGVVTEYSIYVNNKLYKTGMNVPGSFILRDLSPFTIYDIQVEVCTIYACVKSNGTQITTVEDTPSDIPTPTIRGITSRSLQIDWVSPRKPNGIILGYDLLWKTWYPCAKTQKLVQDQSDELCKAVRCQKPESICGHICYSSEAKVCCNGVLYNPKPGHRCCEEKYIPFVLNSTGVCCGGRIQEAQPNHQCCSGYYARILPGEVCCPDEQHNRVSVGIGDSCCGRMPYSTSGNQICCAGRLHDGHGQKCCGRQIVSNDLECCGGEEGVVYNRLPGMFCCGQDYVNMSDTICCSASSGESKAHIKKNDPVPVKCCETELIPKSQKCCNGVGYNPLKYVCSDKISTGMMMKETKECRILCPASMEATEHCGRCDFNFTSHICTVIRGSHNSTGKASIEEMCSSAEETIHTGSVNTYSYTDVNLKPYMTYEYRISAWNSYGRGLSKAVRARTKEDVPQGVSPPTWTKIDNLEDTIVLNWRKPIQSNGPIIYYILLRNGIERFRGTSLSFSDKEGIQPFQEYSYQLKACTVAGCATSSKVVAATTQGVPESILPPSITALSAVALHLSWSVPEKSNGVIKEYQIRQVGKGLIHTDTTDRRQHTVTGLQPYTNYSFTLTACTSAGCTSSEPFLGQTLQAAPEGVWVTPRHIIINSTTVELYWSLPEKPNGLVSQYQLSRNGNLLFLGGSEEQNFTDKNLEPNSRYTYKLEVKTGGGSSASDDYIVQTPMSTPEEIYPPYNITVIGPYSIFVAWIPPGILIPEIPVEYNVLLNDGSVTPLAFSVGHHQSTLLENLTPFTQYEIRIQACQNGSCGVSSRMFVKTPEAAPMDLNSPVLKALGSACIEIKWMPPEKPNGIIINYFIYRRPAGIEEESVLFVWSEGALEFMDEGDTLRPFTLYEYRVRACNSKGSVESLWSLTQTLEAPPQDFPAPWAQATSAHSVLLNWTKPESPNGIISHYRVVYQERPDDPTFNSPTVHAFTVKGTSHQAHLYGLEPFTTYRIGVVAANHAGEILSPWTLIQTLESSPSGLRNFIVEQKENGRALLLQWSEPMRTNGVIKTYNIFSDGFLEYSGLNRQFLFRRLDPFTLYTLTLEACTRAGCAHSAPQPLWTDEAPPDSQLAPTVHSVKSTSVELSWSEPVNPNGKIIRYEVIRRCFEGKAWGNQTIQADEKIVFTEYNTERNTFMYNDTGLQPWTQCEYKIYTWNSAGHTCSSWNVVRTLQAPPEGLSPPVISYVSMNPQKLLISWIPPEQSNGIIQSYRLQRNEMLYPFSFDPVTFNYTDEELLPFSTYSYALQACTSGGCSTSKPTSITTLEAAPSEVSPPDLWAVSATQMNVCWSPPTVQNGKITKYLVRYDNKESLAGQGLCLLVSHLQPYSQYNFSLVACTNGGCTASVSKSAWTMEALPENMDSPTLQVTGSESIEITWKPPRNPNGQIRSYELRRDGTIVYTGLETRYRDFTLTPGVEYSYTVTASNSQGGILSPLVKDRTSPSAPSGMEPPKLQARGPQEILVNWDPPVRTNGDIINYTLFIRELFERETKIIHINTTHNSFGMQSYIVNQLKPFHRYEIRIQACTTLGCASSDWTFIQTPEIAPLMQPPPHLEVQMAPGGFQPTVSLLWTGPLQPNGKVLYYELYRRQIATQPRKSNPVLIYNGSSTSFIDSELLPFTEYEYQVWAVNSAGKAPSSWTWCRTGPAPPEGLRAPTFHVISSTQAVVNISAPGKPNGIVSLYRLFSSSAHGAETVLSEGMATQQTLHGLQAFTNYSIGVEACTCFNCCSKGPTAELRTHPAPPSGLSSPQIGTLASRTASFRWSPPMFPNGVIHSYELQFHVACPPDSALPCTPSQIETKYTGLGQKASLGGLQPYTTYKLRVVAHNEVGSTASEWISFTTQKELPQYRAPFSVDSNLSVVCVNWSDTFLLNGQLKEYVLTDGGRRVYSGLDTTLYIPRTADKTFFFQVICTTDEGSVKTPLIQYDTSTGLGLVLTTPGKKKGSRSKSTEFYSELWFIVLMAMLGLILLAIFLSLILQRKIHKEPYIRERPPLVPLQKRMSPLNVYPPGENHMGLADTKIPRSGTPVSIRSNRSACVLRIPSQNQTSLTYSQGSLHRSVSQLMDIQDKKVLMDNSLWEAIMGHNSGLYVDEEDLMNAIKDFSSVTKERTTFTDTHL

SEQ ID NO: 157 - DNA, 6576 bp, Homo sapiens
  CDS (167)..(2320)
gcggccgcggcggcggggagagcggagggagcgccgcccgcccgcgccgtcctttgtgtggcggcggcggcgcctgggcctgaccgggtccccggggctgagcgccgggctccgcgccgcccctcccgcgcccctgccaagcgggcgcctatcctctccgagcaagatggcaaccccggcggcggtcaaccctccggaaatggcttcagacatacctggatctgtgacgttgcccgttgcccccatggcggccaccggacaggtgaggatggcgggggccatgcctgcccgtggaggaaagcggcgttccggaatggacttcgatgatgaagatggtgaaggccccagtaaattttcaagagagaatcatagtgaaatcgaaaggcgcagacggaacaagatgactcagtacatcacggagctctccgacatggtccccacatgcagcgcactggctcggaagccagacaagctcaccatcctccgcatggccgtctcgcacatgaagtccatgaggggtacagggaacaagtccaccgatggcgcgtacaagccttccttcctcacagagcaggaactgaagcatctcatccttgaagcagctgatggatttctgtttgtggtggctgctgagacagggcgagtgatttatgtgtctgactccgtcacccctgttctgaaccagccccagtcagagtggtttgggagcacactgtatgaacaggtgcatcctgatgacgtggagaagctgagagagcaactgtgcacctcagaaaactcaatgacaggccggatcttggacctgaagactgggacggtcaagaaagaagggcagcagtcatccatgaggatgtgcatgggctcgcggcggtctttcatctgcaggatgaggtgtggaaatgctcctttggaccaccttcctctaaacagaataaccaccatgaggaaaaggttcaggaatggccttggccctgtgaaagaaggagaagcccaatatgctgtggtccactgtacaggatacatcaaggcctggccaccagcaggaatgaccatacctgaagaagacgctgatgtgggacaaggcagtaaatattgcctcgtggcaattgggagactccaggtgaccagctctcctgtatgcatggacatgaatgggatgtcggtgcccacagagttcttatcccggcataactccgatggaatcatcacatttgtggatccaagatgtatcagtgtgattggctaccaaccccaggatcttctgggaaaggacattttggaattctgccaccctgaggatcaaagccatctgcgtgagagcttccagcaggtggttaagctgaaaggccaagtcctgtcggtcatgtatcgatttcgcaccaagaaccgggagtggatgttgatccgcaccagcagcttcacattccagaatccctattctgatgagattgagtacatcatctgcaccaacaccaacgtcaagcaacttcagcaacagcaggcagaattggaagtgcaccagagagatggattgtcatcgtatgacttatcccaggtccccgtccccaacctaccagccggtgttcatgaggccgggaagtccgtggaaaaggcggatgcaatcttctcccaggaaagagatcctcggtttgctgaaatgtttgcaggaattagtgcatcggagaagaagatgatgagctcagcctctgcagcaggaacccagcagatctactcccaaggaagcccatttccctctggacactccgggaaggccttcagctcttcagtggttcatgtgcctggagtgaatgatattcagtcctcttcttccacgggccagaacatgtcccaaatctcccggcagctaaaccagagtcaggtggcatggacagggagtcgtccgccctttccgggacagcaaatcccatctcagtccagcaagactcagtcatctccctttgggattggaacgagccacacctacccggcagacccctcttcctacagccccctctccagcccagctacctcctcgccaagtgggaatgcctactccagtcttgccaacaggactccagggttcgctgaaagtggacaaagtagcgggcagttccaagggcggccctcggaagtctggtcgcagtggcaaagccagcaccatggccagcagagcggtgagcagcactcccaccagcagcccggtcagactgaagtgttccaggacatgctgcccatgccaggagatccaacccaggggactggcaactataacatcgaagactttgccgacctgggcatgtttccaccgttttctgagtagctgcggccagagtgaggctcctgctgtacagtgccacccatactgtgatgtcgatgcccatgtgaatgaggcccaccctcgccctgcttgccctgccgcaggccccccaccagaagccatctcccccgctgtgtgtccccaggcgcatcattgctccactctcccctgcagccgcggctgctcggccactgaccaggggccctggcagacattaggggatcagttgtatttattgtattttatctgtgtgtgctcaggaggtgagcctagtgggtccttaagtttggttgtgaataatctcttgatagacaatttatacccatgaaagttcagccaatgcccagagtgaccaagcagcaccagcaggcctgcccaggatgctgaaagcagatttcttcttgatttcacttctgatggatgcatggggctctgggggaatgctgggaaaatgggcaagcagagtgcacagccctcgttctgccagctggagccaagaagcacagagacacagaggcgcctgcccctcagctccgctggtctgtctgtgcatccactgtgccgtgggacatatgtaatttgtgcagtgtgacatggacttgctgtcctaatggatgtgttgtgccttgtgtctgtcatgtgtggccagcgtgattgtatagaatccagagtatgtagagagccaaaatgtgtggccctgtccccaagctcagcaccaccggccatgaccagaggttgctcggcccagggtctgggagctgggctaacaggctgacacttcggcagggtcaccaggaggcacagctaggggcatgctcacatgggtaggtcagttctttggtccaagcctctggtgcagattcaagctcctcctcttagaggaagcagctccttcctcccacaggagccccaagggagcactcaccctcctcccaattggatctgaatagctgtgttcctgatcccacataagcatgtctcatccttgccccactggtgagaggaggaccttgtgcctgcccagagcctgcaggacagcacgccttgaggtcagaggcctggcccttctttacagatgtagatagcagggtaggacgcccaggccttctcacatgggcaccatgaaacactttcttccaggccacctgagccttcgttcttcagcccgactggaggaacagcagctctgggaggcacagagtgcaggtctcaggggcagaagacatgggttccagttctggttctgccacacacccaccggccttgaatttctctggtggtctcaagacaagaacaagagctgactctagaatcttctgcctggctgacctctgagcccatgatccctggcttgctgtgcttctcttggatttgaggagagtttatgaatccatccccctgttttcagggacctctgccttctcccacaccccttacactagtgaggactccttcggcctcttgtgtttccttccttttgtgaccattacgccccctccctgtttcttatcaccagcccatcagcccactgactcccatatggtagaaaaggtaccgtggctgctgcagggcacatggagggacctaccctctgggaaagcccttgtgtccctcccagagtccttcaggtaggccctcgcagatgctgcttgctcagaaacaacccgtgcatccctgcccatggattctgcaggacctagaagagtggcattggttctaggaacctgagagtggagtgaggccagcatgcaggaaggagtttggagagagtgtttgctgtgatccattgaaagctccacattaaaccccagccctgtctggccagggagatccatgtgctcaatgttgctgggggacctacaaaagtcaaacattgctcagtaaaatgcctttggctggtcgccagctgtgcatgactgcagttcctagactctaacttaaccccaactttgcagtttctagagctttttgtctgtaatggtgattgggtctccactgtagatgcatgcagtgttcactccaacctcagaggctttcttgcttctggggaaatggcaggtggttgaaaccctgcacatcctcccagggccagccccagaatgggcctttctctgcctgccctgcccttggggccacctctgcctccagcaggcttgagcttgccccaggccttgggcataattatttccccccaaaaaaggcacaaaaataggttttggatcaaagaagtgtttctcagtgaaatgaaaacagtctttttatagcctttagcttgtgagtttggaagtttggggggtcttatgtttgttttgcctcttctgtttcttggaggagagttgaggcttttcttaggtgcatacacagacccaggtgaacacgctgactgtgaacctgccctgtatccggagctgtgctgggcactgaggggatgcaacaaaattaggagaggatccttgctcccaacgtctacttctcctacctcaacaggggtccagggtgcagtgaactcagttcttggcccttgggtgaggattcatggatgaatgaaagctagacctgatggggaggcattatgactaaataggcccagcctccttcccttccagctctgtcctaggagcataggcgggaaatctgagtagagtctgactgcagtttttgcttatgatttgtaaaagccgtcatggggtcaataagaaaataggggtgatggagggggagaagcccaggactgggagaatcgcacatgccccaggggttttcaccaaggattttcaagacaaactggagtaagaattaaagccccagaggatttaattatcctggtttgcaaaagagcctcccatgccagtaccgcccagccttggaggccggaatgctcatggcccctgtggtctgcttgtccttcagcccatgcccagcagatacctctctgactggagacgggctcaaagctggattagaaaggggagaggcacttgtgactttgtttgactctgtgactcacttcctcgctcacaccttgtttgaactactggactttcaactggctttccttaggtcaggcaagcagacagctccccactgaagaggtctgtacagtgacaacccgggccggcagcaaggacacagatgcagccacagtaaggctccatcaggactgggtcagtgatggcaacaggatggccaaggatggctctagaacactctgtccatgcgtcactccccccagttttatttttagctttggcttcagggagtgacagccatcacaaatagccacattctgctctactctccaacataccagattctacactgttgttatttcatgagacgtgaatgttgcagagagtggggggattctggttgttaaggaacttacactggggagctttactcttccgtgtcaacaatgtgactacatgttctccagattagccacacatgcaaacatcagtgtccttctagctttagccgagaaagaaaccagtcccagggaatgaatggtggtctccccactcccggcagcactttaggcagcccataagctatgcgagaatgtgaacgctcaccttgctccgtcacggttctgacctaccacataaacaggaagaagccagtgaccggaacagctctaggaataacaagtcagaatagaagtgtcctttatattaccagaaaatatgggcttggcctaagtcgctgtctcctaacctgccggggtcattccccaccaaacaccccatactaaggagccatgagccacctggacattcaccttttctttgaccatctggagtctggggcaacttaaggaggcaccacacagtggtgcaggcacatttccaagcgtaggtgtccctggcttttgtggccaaagctagtgttatggtcaacaacaggccagggtctgtggggcactgaccttgaaagtggcaaaatggaggtttcacaggctgtgcgggagcaggacggcttgcttcatctaacaatctcagtttcctttaaaaaaagaaagaaaggaaaagatttcataagcaggtgtcagtggacagtttaagtacttaaccatttctctttcttcttatggatgtgaactgtgctgtggataaatcatttgtatttcttgaatgttctctatgactaacagttattaagtcggttgtgtatatgtgtaactaatgtaactgccttttaaaatttcattacaataaaaatgactttgctctgaacaacaaaaaaaaaaaaaaaaaaaa

SEQ ID NO: 158 - protein, 717 aa, Homo sapiens
MATPAAVNPPEMASDIPGSVTLPVAPMAATGQVRMAGAMPARGGKRRSGMDFDDEDGEGPSKFSRENHSEIERRRRNKMTQYITELSDMVPTCSALARKPDKLTILRMAVSHMKSMRGTGNKSTDGAYKPSFLTEQELKHLILEAADGFLFVVAAETGRVIYVSDSVTPVLNQPQSEWFGSTLYEQVHPDDVEKLREQLCTSENSMTGRILDLKTGTVKKEGQQSSMRMCMGSRRSFICRMRCGNAPLDHLPLNRITTMRKRFRNGLGPVKEGEAQYAVVHCTGYIKAWPPAGMTIPEEDADVGQGSKYCLVAIGRLQVTSSPVCMDMNGMSVPTEFLSRHNSDGIITFVDPRCISVIGYQPQDLLGKDILEFCHPEDQSHLRESFQQVVKLKGQVLSVMYRFRTKNREWMLIRTSSFTFQNPYSDEIEYIICTNTNVKQLQQQQAELEVHQRDGLSSYDLSQVPVPNLPAGVHEAGKSVEKADAIFSQERDPRFAEMFAGISASEKKMMSSASAAGTQQIYSQGSPFPSGHSGKAFSSSVVHVPGVNDIQSSSSTGQNMSQISRQLNQSQVAWTGSRPPFPGQQIPSQSSKTQSSPFGIGTSHTYPADPSSYSPLSSPATSSPSGNAYSSLANRTPGFAESGQSSGQFQGRPSEVWSQWQSQHHGQQSGEQHSHQQPGQTEVFQDMLPMPGDPTQGTGNYNIEDFADLGMFPPFSE

SEQ ID NO: 159 - DNA, 1834 bp, Homo sapiens
  CDS (239)..(1645)
aaacagcaagcagggctctggcagctgctgcagacggcttcacacagggacgcgggctgccatcttgctctaagtgaaagtgaaagaaaagtcggcagcagagggaacagggaagaaacctaaaggctgcaggctgccaggtgtgcttggagagcccccttcttccgccgggcctcgcaagcagcgtaggactgtggagaagggcggtgggcaaggagggaactcgagagcagcctccatgggcacacaggagggctggtgcctgctgctctgcctggctctatctggagcagcagaaaccaagccccacccagcagaggggcagtggcgggcagtggacgtggtcctagactgcttcctggcgaaggacggtgcgcaccgtggagctctcgccagcagtgaggacagggcaagggcctcccttgtgctgaagcaggtgccagtgctggacgatggctccctggaggacttcaccgatttccaagggggcacactggcccaagatgacccacctattatctttgaggcctcagtggacctggtccagattccccaggccgaggccttgctccatgctgactgcagtgggaaggaggtgacctgtgagatctcccgctactttctccagatgacagagaccactgttaagacagcagcttggttcatggccaacatgcaggtctctggagggggacctagcatctccttggtgatgaagactcccagggtcaccaagaatgaggcgctctggcacccgacgctgaacttgccactgagcccccaggggactgtgcgaactgcagtggagttccaggtgatgacacagacccaatccctgagcttcctgctggggtcctcagcctccttggactgtggcttctccatggcaccgggcttggacctcatcagtgtggagtggcgactgcagcacaagggcaggggtcagttggtgtacagctggaccgcagggcaggggcaggctgtgcggaagggcgctaccctggagcctgcacaactgggcatggccagggatgcctccctcaccctgcccggcctcactatacaggacgaggggacctacatttgccagatcaccacctctctgtaccgagctcagcagatcatccagctcaacatccaagcttcccctaaagtacgactgagcttggcaaacgaagctctgctgcccaccctcatctgcgacattgctggctattaccctctggatgtggtggtgacgtggacccgagaggagctgggtggatccccagcccaagtctctggtgcctccttctccagcctcaggcaaagcgtggcaggcacctacagcatctcctcctctctcaccgcagaacctggctctgcaggtgccacttacacctgccaggtcacacacatctctctggaggagccccttggggccagcacccaggttgtcccaccagagcggagaacagccttgggagtcatctttgccagcagtctcttccttcttgcactgatgttcctggggcttcagagacggcaagcacctacaggacttgggctgcttcaggctgaacgctgggagaccacttcctgtgctgacacacagagctcccatctccatgaagaccgcacagcgcgtgtaagccagcccagctgacctaaagcgacatgagactactagaaagaaacgacacccttccccaagcccccacagctactccaacccaaacaacaaccaagccagtttaatggtaggaatttgtattttttgcctttgttcagaatacatgacattggtaaatatgccacatgcctttggtggaagtacaaaaaaaaaaaaaaaaaa

SEQ ID NO: 160 - protein, 468 aa, Homo sapiens
MGTQEGWCLLLCLALSGAAETKPHPAEGQWRAVDVVLDCFLAKDGAHRGALASSEDRARASLVLKQVPVLDDGSLEDFTDFQGGTLAQDDPPIIFEASVDLVQIPQAEALLHADCSGKEVTCEISRYFLQMTETTVKTAAWFMANMQVSGGGPSISLVMKTPRVTKNEALWHPTLNLPLSPQGTVRTAVEFQVMTQTQSLSFLLGSSASLDCGFSMAPGLDLISVEWRLQHKGRGQLVYSWTAGQGQAVRKGATLEPAQLGMARDASLTLPGLTIQDEGTYICQITTSLYRAQQIIQLNIQASPKVRLSLANEALLPTLICDIAGYYPLDVVVTWTREELGGSPAQVSGASFSSLRQSVAGTYSISSSLTAEPGSAGATYTCQVTHISLEEPLGASTQVVPPERRTALGVIFASSLFLLALMFLGLQRRQAPTGLGLLQAERWETTSCADTQSSHLHEDRTARVSQPS

SEQ ID NO: 161 - DNA, 6734 bp, Homo sapiens
  CDS (113)..(2854)
atgctcagacggcggccaggtcgcgccgcgagcgagcttccgcgccgcccgcacgcgcgacctacctgggcgctccgcgcccccggatgctgcaggttattcagcgatagttatgacctcccggttacgtgcgttgggtggaagaattaataatatacgcacctcggagttacccaaagagaaaactcgatcagaagtcatttgcagcatccactttttagatggcgtggtacagacctttaaagttactaaacaagacactggccaggttcttctggatatggtgcacaaccacctgggtgtgactgaaaaggaatattttggtttacagcatgatgacgactccgtggactctcctagatggctggaagcaagcaaagccatcaggaagcagttaaaaggaggtttcccctgtaccctgcattttcgagtaagattttttatacctgatcccaacacactgcagcaagaacaaaccaggcacttgtatttcttacaactgaagatggatatttgcgaaggaaggttaacctgccctcttaactcagcagtggttctagcgtcctatgccgtacaatctcattttggagactataattcttccatacatcatccaggctatctttccgatagtcactttatacccgatcaaaatgaggactttttaacaaaagtcgaatctctgcatgagcagcacagtgggctaaaacaatcagaagcagaatcctgctatatcaacatagcgcggaccctcgacttctatggagtagaactgcacagtggtagggatctgcacaatttagacctaatgattggaattgcttccgcgggtgttgctgtgtaccgaaaatacatttgcacaagtttctatccttgggtgaacattctcaaaatttctttcaaaaggaaaaagttcttcatacatcagcgacagaaacaggctgaatccagggaacatattgtggccttcaacatgctgaattaccgatcttgcaaaaacttgtggaaatcctgtgttgagcaccatacgttctttcaggcaaagaagctactacctcaggaaaagaatgttctgtctcagtactggactatgggctctcggaacaccaaaaagtcggtaaataaccaatattgcaaaaaggtgattggcgggatggtgtggaacccagccatgcggagatccttatcagtggagcacttagaaaccaagagtctgccttctcgttcccctcccattactcccaactggcgaagtcctcggctccggcacgaaatccgaaagccacgccactcttctgcagataaccttgcaaatgaaatgacctacatcacggaaacggaagatgtattttacacgtacaagggctctctggcccctcaagacagcgattctgaagtttctcagaaccgaagcccgcaccaagagagtttatccgagaacaatccggcacaaagctacctgacccagaagtcatccagttctgtgtctccatcttcaaatgctccaggctcctgctcacctgacggcgttgatcagcagctcttagatgacttccacagggtgaccaaagggggctccaccgaggacgccagccagtactactgtgacaagaatgataatggtgacagctacttagtcttgatccgtatcacaccagatgaagatggaaaatttggatttaatcttaagggaggagtggatcaaaagatgcctcttgtggtatcaaggataaacccagagtcacctgcggacacctgcattcctaagctgaacgaaggggatcaaatcgtgttaatcaatggccgggacatctcagaacacacgcatgaccaagtggtgatgttcatcaaagccagccgggagtcccactcacgggagctggccctggtgatcaggaggagagctgtccgctcatttgctgacttcaagtctgaagatgaactgaaccagcttttccccgaagccattttccccatgtgtccggagggtggggacactttggagggatccatggcacagctaaagaagggcctcgaaagcgggacggtgctgatccagtttgagcaactctacagaaaaaagccaggtttggccatcacgtttgcaaagctgcctcaaaatttggacaaaaaccgatataaagatgtgctgccttatgacaccacccgggtattattgcagggaaatgaagattatattaatgcaagttacgtgaacatggaaattcctgctgctaaccttgtgaacaagtacatcgccactcaggggcccctgccgcatacctgtgcacagttttggcaggttgtctgggatcagaagttgtcactcattgtcatgttgacgactctcacagaacgagggcggaccaaatgtcaccagtactggccagatccccccgacgtcatgaaccacggcggctttcacatccagtgtcagtcagaggactgcaccatcgcctatgtgtcccgagaaatgctggtcacaaacacccagaccggggaagaacacacagtgacacatctccagtacgtcgcatggcctgaccacggtgtgcccgatgactcctccgactttctggaatttgtaaactatgtgaggtctctgagagtggacagcgagcccgtcctagttcactgcagtgctggaataggtcgaaccggtgtgttggtcactatggaaacagccatgtgcctaactgagaggaacctgcccatttacccactggatattgtccgaaaaatgcgagaccagcgcgccatgatggtgcagacatcaagccagtacaagtttgtgtgtgaagcgattcttcgtgtgtatgaagaaggtttagtccaaatgctggatcctagttaagacaactgtgaaaaagttcattcctctttcccaagggcatcctccttgaaagaggaggacagacctctctggaagcagcaagaggaaccagtagctgtgggaaaggaatgggcacctctgaacccaggcactttaaacttctatagaaaagatatcgtgtacataggaactggtgtagataagcatgcaattatggcatcatttaggcctgtatttctatggaaagatacaaaaaggatctcagtttggggcctgtcctaatgccttcttccctaacatcaccacacacacccctgtcggcatcctggagcaattgagaccggacacccacagagctgttgtcctcccagcaacaagatggtgtggttatcttgggtcatttggatgttttgtttgtttctgtgtgtcagactgtaagggctgagctttctgtgcttctaggtggagctggaacaattcagattcacccgccctgatgctaaggaaaccctgacgtatgtactagatggcagggcactgggggtcaggctgaaggctgagcaacacctctctgccctccctccctttgtcccatctcccagcgacttccaatattcatgtttctgagaattgtgtccctcttcaggttccctcttggtgcctaacctggattagtaatgtgcattcaggtgaattttcagctgaggctctgagaactggtactctcagtgtgttctggtcatcttgtggcttagttgtagaagcaggtgtgtctcttgcctctgcttgcctcctactgcacactcagcacccaggactggaatcaccgactactgaatctcctacatgtattgctgctacttcaagctcctccacttgaaaccttatgattttcccaaggggagatgggacagtgtcatctaaatattccgaatgtttggccttctgagaaaagagcttctagtaattgaaccatgggaaacccagcttctggagggttggccgtggggctgtgtacatgtgtgtgcccaggggtgagtgtttctcaggattcctaacgattcaaattaccgttgagtatatataaagaatgagtctctgtatggaagaacaaatgtgtgcattcacccccagtcacaatggtctccattgcatttcaaaggagaggatcagactatctgaatataaacacaatctgatgttaatttattctaagaacaccatcattttgattgtcctaaagaattctgcctttgtgaataccgtgttaaatttttttaaatttgtgacaggattgtagcaaattattatttaaggaaaataaattgtgtaaacatttaatgtggtatttttgaacagcggtttttatgtactcagaagaggaagtaaagccaggttcttaatggtatttatagaaaagatgttttcatattataatgcacataaatgaagccattttgatattcagcaaattcggtgccaattgaatagtttgctggtagcaagacggatgaagacctatatgggagattctttatctctagagctagcatatttacttgcatactttgtttcttttccacatggatattttactgctaaatggcagaggtgggagggagatgtcacacagtaccataaccccatattgaaaacaagaaaccaccagaaagtttgcagctaaggggcaggggattcagttcctacgcccactcagcactaactacttgcgggcctggttgcttagaagctctacctctctttcattatctgtaaaatagaaacaatacttaggactttagttggaacatgaggattgaataagatcacgctattcatgtgactttttatcggctagaacagcaacagacactgctgtgggtgagttacttagaaaagtttagttatcagtgattagcccaaaaacacatcagtcaaaaatagaatccactggatttttgtctctctttttagagacagggtctcactgtcgcccaggctggagtacagtggcatgatcattgttcactgcagcctcaaattcctgggctcaagcaatcctcgcacctcagcctcctgagtagccgggactataggcacatgccacctcacctggcttgtgtgtgtgtgtgtgtgtgtgtgtgtgtgtgtgtgtgtgtgtgtgtgtgtgtgtgtgtgtgtagagacaggatcttgatgtgttgcctaggctggtctcaaactcctggcctcaagtgatcttcccacctcagcctccaaaactgttgggattataggcgtgagccactgtgcccagcctaactgggtttttatgagaggaaaatagaaaatgctcttctagaagagagagaacaagagcacaaaataatctggactcacaaaaattcagcaagctccaagaaagggggatggagggaacgctggcaaaaatttaaatgccattaggatatttagcaagttattactgtttggtaaaaatgcatcatcaccctgtgtgcaaaatgcttgcaaagtagtctaaatgtctttggagatgggtgttttactgcttttttccaaaaacaaattgtttattatggttgcagaaatgcagccattacggtcacataaatttctaaaaagcctaccaaaggttgcaagcagtcttctgccactgggcaggccagcagttcagacccagcgaggttgccaggaacaaatccaggaaatactgggaagaacaagacaagagaattacctaaaagagcaaacaattcaagtaaatcctgtagctattaccacttaaaatccgtagctcaagattcctgtttcaccaccttatacacttaagcaattatacttaagcctttttttagtcctaagtgaagaactacatcagaatcaggataagtattttgcctgggaaatttggctgcatatgaatggagaagacatttacatcctatgttctggcactttctgaaagatctaattaaacatgttgatgtgccaatttaatcaagatgagagatccctgctggtgtcaccctctagaacctgcacttggtgttttgactttccagaagaaaaaaatgcaactttggttagggggcagtggttggatcacacagttgtctttcgtttcctaccacagtaattcatatttaaatatgcttttagattagtgtggatactattgctgctgtgttgctacctgacctttttctggggggggtacctcagaaatgagcatttgagggcaagcgaaaaagccctcttcatcctccagaggcaacaaagaggcagcagaaatggggaaagattgtgagaggcagggcttgggtctagacctggacttaggcaagatatgttgccctcaaccctgagttttcttatatgtaaaaagggaaggttgggctggactagatgaggtcaagatttgccattctgggaggctgatattccagagaatcaaaattaatcctaaaccaaagctttatggctgctacagagacatgtcacatttctgagacttgtcaccaagagtttgtccctcagactttggcgctgttgaatgcaaagacaaggatggccaccttctggttcttgcctgttgtcctcagctgagagcagtctcggtaaaggtggcaaagattctgtgacctcagaccggggaccaaatgcttgggagtctgatggccgggctgggccaccattctcatagctctcattctgtttggagcaaccaaaggatttgtgtgaagttatttggaaaaggaccttaactgagcagtaatcttttttctgtatatttggaatgtttttcattctgacctgttctgtcagtgattctactgaaaaacaatttaatcaatataaaaatgttcaagctatgcaacactgtaaaaaaaaaaaaaaaaaa

SEQ ID NO: 162 - protein, 913 aa, Homo sapiens
MTSRLRALGGRINNIRTSELPKEKTRSEVICSIHFLDGVVQTFKVTKQDTGQVLLDMVHNHLGVTEKEYFGLQHDDDSVDSPRWLEASKAIRKQLKGGFPCTLHFRVRFFIPDPNTLQQEQTRHLYFLQLKMDICEGRLTCPLNSAVVLASYAVQSHFGDYNSSIHHPGYLSDSHFIPDQNEDFLTKVESLHEQHSGLKQSEAESCYINIARTLDFYGVELHSGRDLHNLDLMIGIASAGVAVYRKYICTSFYPWVNILKISFKRKKFFIHQRQKQAESREHIVAFNMLNYRSCKNLWKSCVEHHTFFQAKKLLPQEKNVLSQYWTMGSRNTKKSVNNQYCKKVIGGMVWNPAMRRSLSVEHLETKSLPSRSPPITPNWRSPRLRHEIRKPRHSSADNLANEMTYITETEDVFYTYKGSLAPQDSDSEVSQNRSPHQESLSENNPAQSYLTQKSSSSVSPSSNAPGSCSPDGVDQQLLDDFHRVTKGGSTEDASQYYCDKNDNGDSYLVLIRITPDEDGKFGFNLKGGVDQKMPLVVSRINPESPADTCIPKLNEGDQIVLINGRDISEHTHDQVVMFIKASRESHSRELALVIRRRAVRSFADFKSEDELNQLFPEAIFPMCPEGGDTLEGSMAQLKKGLESGTVLIQFEQLYRKKPGLAITFAKLPQNLDKNRYKDVLPYDTTRVLLQGNEDYINASYVNMEIPAANLVNKYIATQGPLPHTCAQFWQVVWDQKLSLIVMLTTLTERGRTKCHQYWPDPPDVMNHGGFHIQCQSEDCTIAYVSREMLVTNTQTGEEHTVTHLQYVAWPDHGVPDDSSDFLEFVNYVRSLRVDSEPVLVHCSAGIGRTGVLVTMETAMCLTERNLPIYPLDIVRKMRDQRAMMVQTSSQYKFVCEAILRVYEEGLVQMLDPS

SEQ ID NO: 163 - DNA, 994 bp, Homo sapiens
  CDS (219)..(773)
aagactcaaacttagaaacttgaattagatgtggtattcaaatccttagctgccgcgaagacacagacagcccccgtaagaacccacgaagcaggcgaagttcattgttctcaacattctagctgctcttgctgcatttgctctggaattcttgtagagatattacttgtccttccaggctgttctttctgtagctcccttgttttctttttgtgatcatgttgcagatggctgggcagtgctcccaaaatgaatattttgacagtttgttgcatgcttgcataccttgtcaacttcgatgttcttctaatactcctcctctaacatgtcagcgttattgtaatgcaagtgtgaccaattcagtgaaaggaacgaatgcgattctctggacctgtttgggactgagcttaataatttctttggcagttttcgtgctaatgtttttgctaaggaagataaactctgaaccattaaaggacgagtttaaaaacacaggatcaggtctcctgggcatggctaacattgacctggaaaagagcaggactggtgatgaaattattcttccgagaggcctcgagtacacggtggaagaatgcacctgtgaagactgcatcaagagcaaaccgaaggtcgactctgaccattgctttccactcccagctatggaggaaggcgcaaccattcttgtcaccacgaaaacgaatgactattgcaagagcctgccagctgctttgagtgctacggagatagagaaatcaatttctgctaggtaattaaccatttcgactcgagcagtgccactttaaaaatcttttgtcagaatagatgatgtgtcagatctctttaggatgactgtatttttcagttgccgatacagctttttgtcctctaactgtggaaactctttatgttagatatatttctctaggttactgttgggagcttaatggtagaaacttccttggtttcatgattaaactcttttttttcctga

SEQ ID NO: 164 - protein, 184 aa, Homo sapiens
MLQMAGQCSQNEYFDSLLHACIPCQLRCSSNTPPLTCQRYCNASVTNSVKGTNAILWTCLGLSLIISLAVFVLMFLLRKINSEPLKDEFKNTGSGLLGMANIDLEKSRTGDEIILPRGLEYTVEECTCEDCIKSKPKVDSDHCFPLPAMEEGATILVTTKTNDYCKSLPAALSATEIEKSISAR

SEQ ID NO: 165 - DNA, 2682 bp, Homo sapiens
  CDS (71)..(1993)
ccccacccgcttccggccgcggctcggttctcccgcctccgcctccgccgcggctcgtggttgtcccgccatggcactgtcgcgggggctgccccgggagctggctgaggcggtggccgggggccgggtgctggtggtgggggcgggcggcatcggctgcgagctcctcaagaatctcgtgctcaccggtttctcccacatcgacctgattgatctggatactattgatgtaagcaacctcaacagacagtttttgtttcaaaagaaacatgttggaagatcaaaggcacaggttgccaaggaaagtgtactgcagttttacccgaaagctaatatcgttgcctaccatgacagcatcatgaaccctgactataatgtggaatttttccgacagtttatactggttatgaatgctttagataacagagctgcccgaaaccatgttaatagaatgtgcctggcagctgatgttcctcttattgaaagtggaacagctgggtatcttggacaagtaactactatcaaaaagggtgtgaccgagtgttatgagtgtcatcctaagccgacccagagaacctttcctggctgtacaattcgtaacacaccttcagaacctatacattgcatcgtttgggcaaagtacttgttcaaccagttgtttggggaagaagatgctgatcaagaagtatctcctgacagagctgaccctgaagctgcctgggaaccaacggaagccgaagccagagctagagcatctaatgaagatggtgacattaaacgtatttctactaaggaatgggctaaatcaactggatatgatccagttaaactttttaccaagctttttaaagatgacatcaggtatctgttgacaatggacaaactatggcggaaaaggaaacctccagttccgttggactgggctgaagtacaaagtcaaggagaagaaacgaatgcatcagatcaacagaatgaaccccagttaggcctgaaagaccagcaggttctagatgtaaagagctatgcacgtcttttttcaaagagcatcgagactttgagagttcatttagcagaaaagggggatggagctgagctcatatgggataaggatgacccatctgcaatggattttgtcacctctgctgcaaacctcaggatgcatattttcagtatgaatatgaagagtagatttgatatcaaatcaatggcagggaacattattcctgctattgctactactaatgcagtaattgctgggttgatagtattggaaggattgaagattttatcaggaaaaatagaccagtgcagaacaatttttttgaataaacaaccaaacccaagaaagaagcttcttgtgccttgtgcactggatcctcccaaccccaattgttatgtatgtgccagcaagccagaggtgactgtgcggctgaatgtccataaagtgactgttctcaccttacaagacaagatagtgaaagaaaaatttgctatggtagcaccagatgtccaaattgaagatgggaaaggaacaatcctaatatcttccgaagagggagagacggaagctaataatcacaagaagttgtcagaatttggaattagaaatggcagccggcttcaagcagatgacttcctccaggactatactttattgatcaacatccttcatagtgaagacctaggaaaggacgttgaatttgaagttgttggtgatgccccggaaaaagtggggcccaaacaagctgaagatgctgccaaaagcataaccaatggcagtgatgatggagctcagccctccacctccacagctcaagagcaagatgacgttctcatagttgattcagatgaagaagattcttcaaataatgccgacgtcagtgaagaagagagaagccgcaagaggaaattagatgagaaagagaatctcagtgcaaagaggtcacgtatagaacagaaggaagagcttgatgatgtcatagcattagattgaacagaaatgcctctaaacagaaccctcttactatttagtttatctgggcagaaccagattgttatgtcctttgttccaaagggaaaaaattgacagcagtgacttgaaaatgattctgctccctttgaaagcattcattttgctagaactgttagacacattgcagtatgctgtattgaaagtaggaatatagttttaaaaaccctttgaacaaagtgtgtgcataaccagtcatgagataaaacaacacaatgcatgttgcctttttaatgtaaatacccgtaggtatcattaatagtttcaaaatattgtggtttagtaaagttgatacctggttataaatattatgcctttatttttggctagaagaagaattatttttagcctagatctaaccattttcatactcttaactgattgaaacagattcaaagaagtatcgagtgctatgcattgaaacttgtttttaaatgttagatggcactatgtatattaatgtaaaacaatgttaatttactcaagttttcagtttgtaccgcctggtatgtctgtgtaagaagccaatttttgtgtattgttacagtttcaggttatttatattcgatgttttgtaaaactcaaataacgactatacttatggaccaaataaatggcatctgcattcttgttacaaaaaaaaaaaaaaaaaa

SEQ ID NO: 166 - protein, 640 aa, Homo sapiens
MALSRGLPRELAEAVAGGRVLVVGAGGIGCELLKNLVLTGFSHIDLIDLDTIDVSNLNRQFLFQKKHVGRSKAQVAKESVLQFYPKANIVAYHDSIMNPDYNVEFFRQFILVMNALDNRAARNHVNRMCLAADVPLIESGTAGYLGQVTTIKKGVTECYECHPKPTQRTFPGCTIRNTPSEPIHCIVWAKYLFNQLFGEEDADQEVSPDRADPEAAWEPTEAEARARASNEDGDIKRISTKEWAKSTGYDPVKLFTKLFKDDIRYLLTMDKLWRKRKPPVPLDWAEVQSQGEETNASDQQNEPQLGLKDQQVLDVKSYARLFSKSIETLRVHLAEKGDGAELIWDKDDPSAMDFVTSAANLRMHIFSMNMKSRFDIKSMAGNIIPAIATTNAVIAGLIVLEGLKILSGKIDQCRTIFLNKQPNPRKKLLVPCALDPPNPNCYVCASKPEVTVRLNVHKVTVLTLQDKIVKEKFAMVAPDVQIEDGKGTILISSEEGETEANNHKKLSEFGIRNGSRLQADDFLQDYTLLINILHSEDLGKDVEFEVVGDAPEKVGPKQAEDAAKSITNGSDDGAQPSTSTAQEQDDVLIVDSDEEDSSNNADVSEEERSRKRKLDEKENLSAKRSRIEQKEELDDVIALD

SEQ ID NO: 167 - DNA, 18212 bp, Homo sapiens
  CDS (230)..(17137)
gaagccgcatccagacaaaagctgccgcatccctgccctgcccaacccctggagggattcgagtttggtgcttgtccccgtctgattctcagcgccaaactttttgctagttcagagattccaagagtctgatgagttactctgagaggaaaccctctgcctgttgttgaggaggactgagcacagtgcttaggcgctgagggggaaaaagagggggaaaaaaaagaaaatgatttcctgggaagttgtccatacagtattcctgtttgctcttctttattcttccctagctcaagatgcgagcccccagtcagagatcagagctgaggaaattcccgagggggcctccacgttggcttttgtgtttgatgtgactggttctatgtatgatgatttagttcaggtgattgaaggggcttccaaaattttggagacgtctttgaaaagacctaaaagacctcttttcaactttgcgttggtgcctttccatgatccagaaattggcccagtgacaattaccacagatcccaagaaatttcaatatgaactcagagaactgtatgttcagggtggtggtgattgcccagaaatgagtattggagctataaaaattgccttggaaatttctcttcctggttctttcatctatgttttcactgatgctcggtccaaagattaccggctcacccatgaggtgctgcaacttatccaacagaaacagtcacaagtcgtatttgttctgactggagattgtgatgacaggacccatattggatataaagtctatgaagaaattgcctctacaagttctggtcaagtgttccatctggacaaaaaacaagttaatgaggtattaaaatgggtagaagaagcagtacaggcctccaaagttcaccttttatccacagatcatttggaacaggctgtaaatacttggagaattccttttgatcccagcctgaaagaggtcactgtgtctttgagtgggccttctccaatgattgaaattcgcaatcctttagggaagctgataaaaaagggatttggcctgcatgagctattaaatatccataactctgccaaagtagtgaatgtgaaagagccagaggctggaatgtggacagtgaagacctcaagcagtggaaggcactctgttcgcattactggcctcagtactattgatttccgagctggcttttctcgaaagcccaccctggacttcaaaaaaacagtcagcagaccagtgcaaggaatacctacctatgtactgctcaatacttctggaatttccactccagctagaatagatcttcttgaacttttgagtatctcaggaagttctcttaagactattcctgttaaatattacccacatcgaaaaccttatggcatatggaatatttctgactttgtaccaccaaatgaagctttctttctcaaagtaacaggctatgataaagatgattacctcttccagagagtatcaagtgtttccttttctagtattgtcccagatgctcccaaagttacgatgcctgagaaaaccccaggatactatctgcagccgggccaaattccctgctctgttgacagtcttttgccctttaccttgagctttgtcagaaatggagttacacttggagtagaccagtatttgaaagaatctgccagtgtgaacttagatattgcaaaggtcactttgtctgacgaaggtttctatgaatgcattgctgtcagcagtgcaggtactggacgggcacagacattttttgacgtatcagagccccctccggtcatccaagtgcctaacaatgttacagtcactcctggagagagagcagttttaacatgtctcatcatcagtgcggtggattacaatctaacctggcagaggaatgacagagatgtcagactggcagagccagcgagaattaggaccttggctaatctgtcattggagctaaagagtgtgaaattcaacgatgctggagagtatcattgtatggtttctagtgaaggtggatcatcagccgcttcagttttcctcacagtgcaagaaccacccaaagtcactgtgatgcccaagaatcagtctttcacaggagggtctgaggtctccatcatgtgttctgcaacaggttatcccaaaccaaagattgcctggaccgttaacgatatgtttatcgtgggttcacacaggtataggatgacctcagatggtaccttatttatcaaaaatgcagctcccaaagatgcagggatctatggttgcctagcaagtaattcagctggaacagataaacagaattctactctcagatacattgaagcccctaagttgatggtagttcagagtgagctcttggttgcccttggggatataaccgttatggaatgcaaaacctctggtattcctccacctcaagttaaatggttcaaaggagatcttgagttgaggccctcaacattcctcattattgaccctctcttgggacttttgaagattcaagaaacacaagatctggatgctggcgattatacctgtgtagccatcaatgaggctggaagagcaactggcaagataactctggatgttggctcacctccagttttcatacaagaacctgctgatgtgtctatggaaattggctcaaatgtgacattaccttgttatgttcagggttatccagaaccaacaatcaaatggcgaagattagacaacatgccaattttctcaagacctttttcagttagttccatcagccaactaagaacaggagctctctttattttaaacttatgggcaagtgataaaggaacctatatttgtgaagctgaaaaccagtttggaaagatccagtcagagacaacagtaacagtgaccggacttgttgctccacttattggaatcagcccttcagtggccaatgttattgaaggacagcagcttactttgccctgtactctgttagctggaaatcccattccagaacgtcggtggattaagaattcagctatgttgctccaaaatccttacatcactgtgcgcagtgatgggagcctccatattgaaagagttcagcttcaggatggtggtgaatatacttgtgtggccagtaacgttgctgggaccaataacaaaactacctctgtggttgtgcatgttctgccaaccattcagcatgggcagcagatactcagtacaattgaaggcattccagtaactttaccatgcaaagcaagtggaaatcccaaaccgtctgtcatctggtccaagaaaggagagctgatttcaaccagcagtgctaagttttcagcaggagctgatggtagtctgtatgtggtatcacctggaggagaggagagtggggagtatgtctgcactgccaccaatacagccggctacgccaaaaggaaagtgcagctaacagtctatgtaaggcccagagtgtttggagatcaacgaggactgtcccaggataagcctgttgagatctccgtccttgcaggggaagaggtaacacttccatgtgaagtgaagagcttacctccacccataattacttgggccaaagaaacccagctcatctcaccgttctctccaagacacacattcctcccttctggttcaatgaagatcactgaaacccgcacttcagatagtgggatgtatctttgtgttgccacaaatattgctgggaatgtgactcaggctgtcaaattaaatgtccatgttcctccaaagatacagcgtggacctaaacatctcaaagtccaagttggtcaaagagtggatattccatgtaatgctcaagggactcctcttcctgtaatcacctggtccaaaggtggaagcactatgctggttgatggagagcaccatgttagcaatccagacggaactttaagcatcgaccaagccacgccctcagatgctggcatatatacatgtgttgctactaacatagcaggcactgatgaaacagagataacgctacatgtccaagaaccacccacagtggaagatctagaacctccatataacactactttccaagaaagagtggccaatcaacgcattgaatttccatgtcctgcaaaaggtacccctaaaccaaccatcaaatggttacacaatggtagagagttgacaggcagagagcctggcatttctatcttggaagatggcacattgctggttattgcttctgttacaccctatgacaatggggagtacatctgtgtggcagtcaatgaagctggaaccacagaaagaaaatataacctcaaagtccatgttcctccagtaattaaagataaagaacaagttacaaatgtgtcggtgttgttaaatcagctgaccaatctcttctgtgaagtggaaggcactccatctcccatcattatgtggtataaagataatgtccaggtgactgaaagcagcactattcagactgtgaacaatgggaagatactgaagctcttcagagccactccagaggatgcaggaagatattcctgcaaagcaattaatattgcaggcacttctcagaagtactttaacattgatgtgctagttccacccaccataataggtaccaacttcccaaatgaagtctcagttgtcctcaaccgtgacgtcgcccttgaatgccaggtcaaaggcactccctttcctgatattcattggttcaaagatggcaagcctttatttttgggcgatcctaatgttgaacttctagacagaggacaagtcttacatttaaagaatgcacggagaaatgacaaggggcgctaccaatgtactgtgtctaatgcagctggcaaacaagccaaggatataaaactgactatctatattccacctagtattaaaggaggaaatgtcaccacagacatatcagtattgatcaacagccttattaaactggaatgtgaaacacggggacttccaatgcctgccattacttggtataaggacgggcagccaatcatgtccagctcacaagcactttatattgataaaggacaatatcttcatattcctcgagcacaggtctctgattcagcaacatatacgtgtcatgtagccaatgttgctggaactgctgaaaaatcattccatgtggatgtctatgttcctccaatgattgaaggcaacttggccacgcctttgaataagcaagtagttattgctcattctctgacactggagtgcaaagctgctggaaacccttctcccattctcacctggttgaaagatggtgtacctgtgaaagctaatgacaatatccgcatagaagctggtgggaagaaactcgaaatcatgagtgcccaagaaattgatcgaggacagtacatatgcgtggctaccagtgtggcaggagaaaaggaaatcaaatatgaagttgatgtcttggtgccaccagctatagaaggaggagatgaaacatcttacttcattgtgatggttaataacttactggagctagattgtcatgtgacaggctctcccccaccaactatcatgtggctgaaggatggccagttaattgatgaaagggatggattcaagattttattaaatggacgcaaactggttattgctcaggctcaagtgtcaaacacaggcctttatcggtgcatggcagcaaatactgctggagaccacaagaaggaatttgaagtgactgttcatgttcctccaacaatcaagtcctcaggcctttctgagagagttgtggtaaaatacaagcctgtcgccttgcagtgcatagccaatgggattccaaatccttccattacatggttaaaagatgaccagcctgtgaacactgcccaaggaaaccttaaaatacagtcttctggtcgagttctacaaattgccaaaaccctgttggaagatgctggcagatacacatgtgtggctaccaacgcagctggagaaacacaacagcacattcaactgcatgttcatgaaccacctagtctggaagatgctggaaaaatgctgaatgagactgtgttggtgagcaaccctgtacagctggagtgtaaggcagctggaaatcctgtgcctgttattacatggtacaaagataatcgtctactctcaggttccaccagcatgactttcttgaacagaggacagatcattgatattgaaagtgcccagatctcagatgctggcatatataaatgcgtggccatcaactcagctggagctacagagttattttacagtctgcaagttcatgtggccccatcaatttctggcagcaataacatggtggcagtggtggttaataacccggtgaggttagaatgtgaagccagaggtattcctgccccaagtctgacctggttgaaagatgggagtcctgtttctagtttttctaatggattacaggttctctctggtggtcgaatcctagcattgaccagtgcacaaatcagcgacacaggaaggtacacctgcgtggcagtgaatgctgctggagaaaagcaaagggacattgacctccgagtatatgttccgccaaatattatgggagaagaacagaatgtctctgtcctcattagccaagctgtggaattactatgtcaaagtgatgctattcccccacctactcttacttggttaaaagacggccaccccttgctgaagaaaccaggcctcagtatatctgaaaatagaagtgtgttaaagattgaagatgctcaggttcaagacactggtcgttacacttgtgaagcaacaaatgttgctggaaaaactgaaaaaaactacaatgtcaacatttgggtccccccaaatattggtggttctgatgaacttactcaacttacagtcattgaagggaatctcattagtctgttgtgtgaatcaagtggtattccacccccaaatctcatctggaagaagaaaggctctccagtgctgactgattccatggggcgagttagaattttatctgggggcaggcaattacaaatttcaattgctgaaaagtctgatgcagcactctattcatgtgtggcgtcgaatgttgctgggactgcaaagaaagaatacaatctgcaagtttacattagaccaaccataaccaacagtggcagccaccctactgaaattattgtgacccgagggaagagtatctccttggagtgtgaggtgcagggtattccaccaccaacagtgacctggatgaaagatggccaccccttgatcaaggcaaagggagtagaaatactggatgaaggtcacatccttcagctgaagaacattcatgtatctgacacaggccgttatgtgtgtgttgctgtgaatgtagcaggaatgactgacaaaaaatatgacttaagtgtccatgctcctccaagcatcataggaaaccacaggtcacctgaaaatattagtgtggtagaaaagaactcagtatctttgacttgtgaagcttctggaattcccctgccttccataacctggttcaaagatgggtggcctgtcagccttagcaattctgtgaggattctttcaggaggcaggatgctacggctgatgcagaccacaatggaagatgctggccaatatacttgcgttgtaaggaatgcagctggtgaagaaagaaaaatctttgggctttcagtattagtaccacctcatattgtgggtgaaaatacattggaagatgtgaaggtaaaagagaaacagagtgttacgctgacttgtgaagtgacagggaatccagtgccagaaattacatggcacaaagatgggcagcccctccaagaagatgaagcccatcacattatatctggtggccgttttcttcaaattaccaatgtccaggtgccacacactggaagatatacatgtttggcttccagtccagctggccacaagagcaggagcttcagtcttaatgtatttgtatctcctacaattgctggtgtaggtagtgatggcaaccctgaagatgtcactgtcatccttaacagccctacatctttggtctgtgaagcttattcatatcctccagctaccatcacctggtttaaggatggcactcctttagaatctaaccgaaatattcgtattcttccaggaggcagaactctgcagatcctcaatgcacaggaggacaatgctggaagatactcttgtgtagccacgaatgaggctggagaaatgataaagcactatgaagtgaaggtgtacattccacccataatcaataaaggggacctttgggggccaggtctttcccctaaagaagtgaagatcaaagtaaacaacactctgaccttggaatgtgaagcgtatgcaattccttctgcctccctcagctggtacaaggatggacagccccttaaatccgatgatcatgttaatattgctgcgaatggacacacacttcaaataaaggaggctcaaatatcagacaccggacgatatacttgtgtagcatctaacattgcaggtgaagatgagttggattttgatgtgaatattcaagttcctccaagttttcagaaactctgggaaataggaaacatgctagatactggcaggaatggtgaagccaaagatgtgatcatcaacaatcccatttctctttactgtgagacaaatgctgctccccctcctacactgacatggtacaaagatggccaccctctgacctcaagtgataaagtattgattttgccaggagggcgagtgttgcagattcctcgggctaaagtagaagatgctgggagatacacatgtgtggctgtgaatgaggctggagaagattcccttcaatatgatgtccgtgtactcgtgccgccaattatcaagggagcaaatagtgatctccctgaagaggtcaccgtgctggtgaacaagagtgcactgatagagtgtttatccagtggcagcccagcaccaaggaattcctggcagaaagatggacagcccttgctagaagatgaccatcataaatttctatctaatggacgaattctgcagattctgaatactcaaataacagatatcggcaggtatgtgtgtgttgctgagaacacagctgggagtgccaaaaaatattttaacctcaatgttcatgttcctccaagtgtcattggtcctaaatctgaaaatcttaccgtcgtggtgaacaatttcatctctttgacctgtgaggtctctggttttccacctcctgacctcagctggctcaagaatgaacagcccatcaaactgaacacaaatactctcattgtgcctggtggtcgaactctacagattattcgggccaaggtatcagatggtggtgaatacacttgtatagctatcaatcaagctggcgaaagcaagaaaaagttttccctgactgtttatgtgcccccaagcattaaagaccatgacagtgaatctctttctgtagttaatgtaagagagggaacttctgtgtctttggagtgtgagtcgaacgctgtgccacctccagtcatcacttggtataagaatgggcggatgataacagagtctactcatgtggagattttagctgatggacaaatgctacacattaagaaagctgaggtatctgacacaggccagtatgtatgtagagctataaatgtagcaggacgggatgataaaaatttccacctcaatgtatatgtgccacccagtattgaaggacctgaaagagaagtgattgtggagacgatcagcaatcctgtgacattaacatgtgatgccactgggatcccacctcccacgatagcatggttaaagaaccacaagcgcatagaaaattctgactcactggaagttcgtattttgtctggaggtagcaaactccagattgcccggtctcagcattcagatagtggaaactatacatgtattgcttcaaatatggagggaaaagcccagaaatattactttctttcaattcaagttcctccaagtgttgctggtgctgaaattccaagtgatgtcagtgtccttctaggagaaaatgttgagctggtctgcaatgcaaatggcattcctactccacttattcaatggcttaaagatggaaagcccatagctagtggtgaaacagaaagaatccgagtgagtgcaaatggcagcacattaaacatttatggagctcttacatctgacacggggaaatacacatgtgttgctactaatcccgctggagaagaagaccgaatttttaacttgaatgtctatgttacacctacaattaggggtaataaagatgaagcagagaaactaatgactttagtggatacttcaataaatattgaatgcagagccacagggacgcctccaccacagataaactggctgaagaatggacttcctctgcctctctcctcccatatccggttactggcagcaggacaagttatcaggattgtgagagctcaggtgtctgatgtcgctgtgtatacttgtgtggcctccaacagagctggggtggataataagcattacaatcttcaagtgtttgcaccaccaaatatggacaattcaatggggacagaggaaatcacagttctcaaaggtagttccacctctatggcatgcattactgatggaaccccagctcccagtatggcctggcttagagatggccagcctctggggcttgatgcccatctgacagtcagcacccatggaatggtcctgcagctcctcaaagcagagactgaagattcgggaaagtacacctgcattgcctcaaatgaagctggagaagtcagcaagcactttatcctcaaggtcctagaaccacctcacattaatggatctgaagaacatgaagagatatcagtaattgttaataacccacttgaacttacctgcattgcttctggaatcccagcccctaaaatgacctggatgaaagatggccggccccttccacagacggatcaagtgcaaactctaggaggaggagaggttcttcgaatttctactgctcaggtggaggatacaggaagatatacatgtctggcatccagtcctgcaggagatgatgataaggaatatctagtgagagtgcatgtacctcctaatattgctggaactgatgagccccgggatatcactgtgttacggaacagacaagtgacattggaatgcaagtcagatgcagtgcccccacctgtaattacttggctcagaaatggagaacggttacaggcaacacctcgagtgcgaatcctatctggagggagatacttgcaaatcaacaatgctgacctaggtgatacagccaattatacctgtgttgccagcaacattgcaggaaagactacaagagaatttattctcactgtaaatgttcctccaaacataaaggggggcccccagagccttgtaattcttttaaataagtcaactgtattggaatgcatcgctgaaggtgtgccaactccaaggataacatggagaaaggatggagctgttctagctgggaatcatgcaagatattccatcttggaaaatggattccttcatattcaatcagcacatgtcactgacactggacggtatttgtgtatggccaccaatgctgctggaacagatcgcaggcgaatagatttacaggtccatgttcctccatctattgctccgggtcctaccaacatgactgtaatagtaaatgttcaaactactctggcttgtgaggctactgggataccaaaaccatcaatcaattggagaaaaaatgggcatcttcttaatgtggatcaaaatcagaactcatacaggctcctttcttcaggttcactagtaattatttccccttctgtggatgacactgcaacctatgaatgtactgtgacaaacggtgctggagatgataaaagaactgtggatctcactgtccaagttccaccttccatagctgatgagcctacagatttcctagtaaccaaacatgccccagcagtaattacctgcactgcttcgggagttccatttccctcaattcactggaccaaaaatggtataagactgcttcccaggggagatggctatagaattctgtcctcaggagcaattgaaatacttgccacccaattaaaccatgctggaagatacacttgtgtcgctaggaatgcggctggctctgcacatcgacacgtgacccttcatgttcatgagcctccagtcattcagccccaaccaagtgaactacacgtcattctgaacaatcctattttattaccatgtgaagcaacagggacacccagtcctttcattacttggcaaaaagaaggcatcaatgttaacacttcaggcagaaaccatgcagttcttcctagtggcggcttacagatctccagagctgtccgagaggatgctggcacttacatgtgtgtggcccagaacccggctggtacagccttgggcaaaatcaagttaaatgtccaagttcctccagtcattagccctcatctaaaggaatatgttattgctgtggacaagcccatcacgttatcctgtgaagcagatggcctccctccgcctgacattacatggcataaagatgggcgtgcaattgtggaatctatccgccagcgcgtcctcagctctggctctctgcaaatagcatttgtccagcctggtgatgctggccattacacgtgcatggcagccaatgtagcaggatcaagcagcacaagcaccaagctcaccgtccatgtaccacccaggatcagaagtacagaaggacactacacggtcaatgagaattcacaagccattcttccatgcgtagctgatggaatccccacaccagcaattaactggaaaaaagacaatgttcttttagctaacttgttaggaaaatacactgctgaaccatatggagaactcattttagaaaatgttgtgctggaggattctggcttctatacctgtgttgctaacaatgctgcaggtgaagatacacacactgtcagcctgactgtgcatgttctccccacttttactgaacttcctggagacgtgtcattaaataaaggagaacagctacgattaagctgtaaagctactggtattccattgcccaaattaacatggaccttcaataacaatattattccagcccactttgacagtgtgaatggacacagtgaacttgttattgaaagagtgtcaaaagaggattcaggtacttatgtgtgcaccgcagagaacagcgttggctttgtgaaggcaattggatttgtttatgtgaaagaacctccagtcttcaaaggtgattatccttctaactggattgaaccacttggtgggaatgcaatcctgaattgtgaggtgaaaggagaccccaccccaaccatccagtggaacagaaagggagtggatattgaaattagccacagaatccggcaactgggcaatggctccctggccatctatggcactgttaatgaagatgccggtgactatacatgtgtagctaccaatgaagctggggtggtggagcgcagcatgagtctgactctgcaaagtcctcctattatcactcttgagccagtggaaactgttattaatgctggtggcaaaatcatattgaattgtcaggcaactggagagcctcaaccaaccattacatggtcccgtcaagggcactctatttcctgggatgaccgggttaacgtgttgtccaacaactcattatatattgctgatgctcagaaagaagatacctctgaatttgaatgtgttgctcgaaacttaatgggttctgtccttgtcagagtgccagtcatagtccaggttcatggtggattttcccagtggtctgcatggagagcctgcagtgtcacctgtggaaaaggcatccaaaagaggagtcgtctgtgcaaccagccccttccagccaatggtgggaagccctgccaaggttcagatttggaaatgcgaaactgtcaaaataagccttgtccagtggatggtagctggtcggaatggagtctttgggaagaatgcacaaggagctgtggacgcggcaaccaaaccaggaccaggacttgcaataatccatcagttcagcatggtgggcggccatgtgaagggaatgctgtggaaataattatgtgcaacattaggccttgcccagttcatggagcatggagcgcttggcagccttggggaacatgcagcgaaagttgtgggaaaggtactcagacaagagcaagactttgtaataacccaccaccagcgtttggtgggtcctactgtgatggagcagaaacacagatgcaagtttgcaatgaaagaaattgtccaattcatggcaagtgggcgacttgggccagttggagtgcctgttctgtgtcatgtggaggaggtgccagacagagaacaaggggctgctccgaccctgtgccccagtatggaggaaggaaatgcgaagggagtgatgtccagagtgatttttgcaacagtgacccttgcccaacccatggtaactggagtccttggagtggctggggaacatgcagccggacgtgtaacggagggcagatgcggcggtaccgcacatgtgataaccctcctccctccaatgggggaagagcttgtgggggaccagactcccagatccagaggtgcaacactgacatgtgtcctgtggatggaagttggggaagctggcatagttggagccagtgctctgcctcctgtggaggaggtgaaaagactcggaagcggctgtgcgaccatcctgtgccagttaaaggtggccgtccctgtcccggagacactactcaggtgaccaggtgcaatgtacaagcatgtccaggtgggccccagcgagccagaggaagtgttattggaaatattaatgatgttgaatttggaattgctttccttaatgccacaataactgatagccctaactctgatactagaataatacgtgccaaaattaccaatgtacctcgtagtcttggttcagcaatgagaaagatagtttctattctaaatcccatttattggacaacagcaaaggaaataggagaagcagtcaatggctttaccctcaccaatgcagtcttcaaaagagaaactcaagtggaatttgcaactggagaaatcttgcagatgagtcatattgcccggggcttggattccgatggttctttgctgctagatatcgttgtgagtggctatgtcctacagcttcagtcacctgctgaagtcactgtaaaggattacacagaggactacattcaaacaggtcctgggcagctgtacgcctactcaacccggctgttcaccattgatggcatcagcatcccatacacatggaaccacaccgttttctatgatcaggcacagggaagaatgcctttcttggttgaaacacttcatgcatcctctgtggaatctgactataaccagatagaagagacactgggttttaaaattcatgcttcaatatccaaaggagatcgcagtaatcagtgcccctccgggtttaccttagactcagttggacctttttgtgctgatgaggatgaatgtgcagcagggaatccctgctcccatagctgccacaatgccatggggacttactactgctcctgccctaaaggcctcaccatagctgcagatggaagaacttgtcaagatattgatgagtgtgctttgggtaggcatacctgccacgctggtcaggactgtgacaatacgattggatcttatcgctgtgtggtccgttgtggaagtggctttcgaagaacctctgatgggctgagttgtcaagatattaatgaatgtcaagaatccagcccctgtcaccagcgctgtttcaatgccataggaagtttccattgtggatgtgaacctgggtatcagctcaaaggcagaaaatgcatggatgtgaacgagtgtagacaaaatgtatgcagaccagatcagcactgtaagaacacccgtggtggctataagtgcattgatctttgtccaaatggaatgaccaaggcagaaaatggaacctgtattgatattgatgaatgtaaagatgggacccatcagtgcagatataaccagatatgtgagaatacaagaggcagctatcgttgtgtatgcccaagaggttatcggtctcaaggagttggaagaccctgcatggacattaatgaatgtgaacaagtgcctaaaccttgtgcacatcagtgctccaacacccccggcagcttcaagtgtatctgtccaccaggacaacatttattaggggacgggaaatcttgcgctggattggagaggctgccaaattatggcactcaatacagtagctataaccttgcacggttctcccctgtgagaaacaactatcaacctcaacagcattacagacagtactcacatctctacagctcctactcagagtatagaaacagcagaacatctctctccaggactagaaggactattaggaaaacttgccctgaaggctctgaggcaagccatgacacatgtgtagatattgatgaatgtgaaaatacagatgcctgccagcatgagtgtaagaatacctttggaagttatcagtgcatctgcccacctggctatcaactcacacacaatggaaagacatgccaagatatcgatgaatgtctggagcagaatgtgcactgtggacccaatcgcatgtgcttcaacatgagaggaagctaccagtgcatcgatacaccctgtccacccaactaccaacgggatcctgtttcagggttctgcctcaagaactgtccacccaatgatttggaatgtgccttgagcccatatgccttggaatacaaactcgtctccctcccatttggaatagccaccaatcaagatttaatccggctggttgcatacacacaggatggagtgatgcatcccaggacaactttcctcatggtagatgaggaacagactgttccttttgccttgagggatgaaaacctgaaaggagtggtgtatacaacacgaccactacgagaagcagagacctaccgcatgagggtccgagcctcatcctacagtgccaatgggaccattgaatatcagaccacattcatagtttatatagctgtgtccgcctatccatactaaggaactctccaaagcctattccacatatttaaaccgcattaatcatggcaatcaagcccccttccagattactgtctcttgaacagttgcaatcttggcagcttgaaaatggtgctacactctgttttgtgtgccttccttggtacttctgaggtattttcatgatcccaccatggtcatatcttgaagtatggtctagaaaagtcccttattattttatttattacactggagcagttacttcccaaagattattctgaacatctaacaggacatatcagtgatggtttacagtagtgtagtacctaagatcattttcctgaaagccaaaccaaacaacgaaaaacaagaacaactaattcagaatcaaatagagtttttgagcatttgactatttttagaatcataaaattagttactaagtattttgatcaaagcttataaaataacttacggagatttttgtaagtattgatacattataataggacttgcctattttcatttttaagaagaaaaacaccactcattttataaaatatagtacagctactataaggcttgtttgatcccaaatggtgcttatcttgattgaacattcagaacaaggatattattttcagtgattttgtgagatcagctgaaccacttatgataataataataaaaaagactgctttgccctcacgtcagttgtacatggcatggaactttaaaaattttaatataaactttcatccagttagcttcataacttttacgttccagaattttgtttattttcctgtcaatgaaagcaatttttaaagataccagtgggacaggtttggttttttaaaaatctcatgtgttcaaattaacataaatattacacgtcaatacactgtacatggtggtaatagactctaagcaattgccaagatgtattctatttttatgaagtgtatatatattaccttagtgtgcattttctatataatatcttgatggactcttttataaaattattttataaaaaacaatgttacactaaaatcagcctaaataaattttcacaactttttttcataacctt

SEQ ID NO: 168 - protein, 5635 aa, Homo sapiens
MISWEVVHTVFLFALLYSSLAQDASPQSEIRAEEIPEGASTLAFVFDVTGSMYDDLVQVIEGASKILETSLKRPKRPLFNFALVPFHDPEIGPVTITTDPKKFQYELRELYVQGGGDCPEMSIGAIKIALEISLPGSFIYVFTDARSKDYRLTHEVLQLIQQKQSQVVFVLTGDCDDRTHIGYKVYEEIASTSSGQVFHLDKKQVNEVLKWVEEAVQASKVHLLSTDHLEQAVNTWRIPFDPSLKEVTVSLSGPSPMIEIRNPLGKLIKKGFGLHELLNIHNSAKVVNVKEPEAGMWTVKTSSSGRHSVRITGLSTIDFRAGFSRKPTLDFKKTVSRPVQGIPTYVLLNTSGISTPARIDLLELLSISGSSLKTIPVKYYPHRKPYGIWNISDFVPPNEAFFLKVTGYDKDDYLFQRVSSVSFSSIVPDAPKVTMPEKTPGYYLQPGQIPCSVDSLLPFTLSFVRNGVTLGVDQYLKESASVNLDIAKVTLSDEGFYECIAVSSAGTGRAQTFFDVSEPPPVIQVPNNVTVTPGERAVLTCLIISAVDYNLTWQRNDRDVRLAEPARIRTLANLSLELKSVKFNDAGEYHCMVSSEGGSSAASVFLTVQEPPKVTVMPKNQSFTGGSEVSIMCSATGYPKPKIAWTVNDMFIVGSHRYRMTSDGTLFIKNAAPKDAGIYGCLASNSAGTDKQNSTLRYIEAPKLMVVQSELLVALGDITVMECKTSGIPPPQVKWFKGDLELRPSTFLIIDPLLGLLKIQETQDLDAGDYTCVAINEAGRATGKITLDVGSPPVFIQEPADVSMEIGSNVTLPCYVQGYPEPTIKWRRLDNMPIFSRPFSVSSISQLRTGALFILNLWASDKGTYICEAENQFGKIQSETTVTVTGLVAPLIGISPSVANVIEGQQLTLPCTLLAGNPIPERRWIKNSAMLLQNPYITVRSDGSLHIERVQLQDGGEYTCVASNVAGTNNKTTSVVVHVLPTIQHGQQILSTIEGIPVTLPCKASGNPKPSVIWSKKGELISTSSAKFSAGADGSLYVVSPGGEESGEYVCTATNTAGYAKRKVQLTVYVRPRVFGDQRGLSQDKPVEISVLAGEEVTLPCEVKSLPPPIITWAKETQLISPFSPRHTFLPSGSMKITETRTSDSGMYLCVATNIAGNVTQAVKLNVHVPPKIQRGPKHLKVQVGQRVDIPCNAQGTPLPVITWSKGGSTMLVDGEHHVSNPDGTLSIDQATPSDAGIYTCVATNIAGTDETEITLHVQEPPTVEDLEPPYNTTFQERVANQRIEFPCPAKGTPKPTIKWLHNGRELTGREPGISILEDGTLLVIASVTPYDNGEYICVAVNEAGTTERKYNLKVHVPPVIKDKEQVTNVSVLLNQLTNLFCEVEGTPSPIIMWYKDNVQVTESSTIQTVNNGKILKLFRATPEDAGRYSCKAINIAGTSQKYFNIDVLVPPTIIGTNFPNEVSVVLNRDVALECQVKGTPFPDIHWFKDGKPLFLGDPNVELLDRGQVLHLKNARRNDKGRYQCTVSNAAGKQAKDIKLTIYIPPSIKGGNVTTDISVLINSLIKLECETRGLPMPAITWYKDGQPIMSSSQALYIDKGQYLHIPRAQVSDSATYTCHVANVAGTAEKSFHVDVYVPPMIEGNLATPLNKQVVIAHSLTLECKAAGNPSPILTWLKDGVPVKANDNIRIEAGGKKLEIMSAQEIDRGQYICVATSVAGEKEIKYEVDVLVPPAIEGGDETSYFIVMVNNLLELDCHVTGSPPPTIMWLKDGQLIDERDGFKILLNGRKLVIAQAQVSNTGLYRCMAANTAGDHKKEFEVTVHVPPTIKSSGLSERVVVKYKPVALQCIANGIPNPSITWLKDDQPVNTAQGNLKIQSSGRVLQIAKTLLEDAGRYTCVATNAAGETQQHIQLHVHEPPSLEDAGKMLNETVLVSNPVQLECKAAGNPVPVITWYKDNRLLSGSTSMTFLNRGQIIDIESAQISDAGIYKCVAINSAGATELFYSLQVHVAPSISGSNNMVAVVVNNPVRLECEARGIPAPSLTWLKDGSPVSSFSNGLQVLSGGRILALTSAQISDTGRYTCVAVNAAGEKQRDIDLRVYVPPNIMGEEQNVSVLISQAVELLCQSDAIPPPTLTWLKDGHPLLKKPGLSISENRSVLKIEDAQVQDTGRYTCEATNVAGKTEKNYNVNIWVPPNIGGSDELTQLTVIEGNLISLLCESSGIPPPNLIWKKKGSPVLTDSMGRVRILSGGRQLQISIAEKSDAALYSCVASNVAGTAKKEYNLQVYIRPTITNSGSHPTEIIVTRGKSISLECEVQGIPPPTVTWMKDGHPLIKAKGVEILDEGHILQLKNIHVSDTGRYVCVAVNVAGMTDKKYDLSVHAPPSIIGNHRSPENISVVEKNSVSLTCEASGIPLPSITWFKDGWPVSLSNSVRILSGGRMLRLMQTTMEDAGQYTCVVRNAAGEERKIFGLSVLVPPHIVGENTLEDVKVKEKQSVTLTCEVTGNPVPEITWHKDGQPLQEDEAHHIISGGRFLQITNVQVPHTGRYTCLASSPAGHKSRSFSLNVFVSPTIAGVGSDGNPEDVTVILNSPTSLVCEAYSYPPATITWFKDGTPLESNRNIRILPGGRTLQILNAQEDNAGRYSCVATNEAGEMIKHYEVKVYIPPIINKGDLWGPGLSPKEVKIKVNNTLTLECEAYAIPSASLSWYKDGQPLKSDDHVNIAANGHTLQIKEAQISDTGRYTCVASNIAGEDELDFDVNIQVPPSFQKLWEIGNMLDTGRNGEAKDVIINNPISLYCETNAAPPPTLTWYKDGHPLTSSDKVLILPGGRVLQIPRAKVEDAGRYTCVAVNEAGEDSLQYDVRVLVPPIIKGANSDLPEEVTVLVNKSALIECLSSGSPAPRNSWQKDGQPLLEDDHHKFLSNGRILQILNTQITDIGRYVCVAENTAGSAKKYFNLNVHVPPSVIGPKSENLTVVVNNFISLTCEVSGFPPPDLSWLKNEQPIKLNTNTLIVPGGRTLQIIRAKVSDGGEYTCIAINQAGESKKKFSLTVYVPPSIKDHDSESLSVVNVREGTSVSLECESNAVPPPVITWYKNGRMITESTHVEILADGQMLHIKKAEVSDTGQYVCRAINVAGRDDKNFHLNVYVPPSIEGPEREVIVETISNPVTLTCDATGIPPPTIAWLKNHKRIENSDSLEVRILSGGSKLQIARSQHSDSGNYTCIASNMEGKAQKYYFLSIQVPPSVAGAEIPSDVSVLLGENVELVCNANGIPTPLIQWLKDGKPIASGETERIRVSANGSTLNIYGALTSDTGKYTCVATNPAGEEDRIFNLNVYVTPTIRGNKDEAEKLMTLVDTSINIECRATGTPPPQINWLKNGLPLPLSSHIRLLAAGQVIRIVRAQVSDVAVYTCVASNRAGVDNKHYNLQVFAPPNMDNSMGTEEITVLKGSSTSMACITDGTPAPSMAWLRDGQPLGLDAHLTVSTHGMVLQLLKAETEDSGKYTCIASNEAGEVSKHFILKVLEPPHINGSEEHEEISVIVNNPLELTCIASGIPAPKMTWMKDGRPLPQTDQVQTLGGGEVLRISTAQVEDTGRYTCLASSPAGDDDKEYLVRVHVPPNIAGTDEPRDITVLRNRQVTLECKSDAVPPPVITWLRNGERLQATPRVRILSGGRYLQINNADLGDTANYTCVASNIAGKTTREFILTVNVPPNIKGGPQSLVILLNKSTVLECIAEGVPTPRITWRKDGAVLAGNHARYSILENGFLHIQSAHVTDTGRYLCMATNAAGTDRRRIDLQVHVPPSIAPGPTNMTVIVNVQTTLACEATGIPKPSINWRKNGHLLNVDQNQNSYRLLSSGSLVIISPSVDDTATYECTVTNGAGDDKRTVDLTVQVPPSIADEPTDFLVTKHAPAVITCTASGVPFPSIHWTKNGIRLLPRGDGYRILSSGAIEILATQLNHAGRYTCVARNAAGSAHRHVTLHVHEPPVIQPQPSELHVILNNPILLPCEATGTPSPFITWQKEGINVNTSGRNHAVLPSGGLQISRAVREDAGTYMCVAQNPAGTALGKIKLNVQVPPVISPHLKEYVIAVDKPITLSCEADGLPPPDITWHKDGRAIVESIRQRVLSSGSLQIAFVQPGDAGHYTCMAANVAGSSSTSTKLTVHVPPRIRSTEGHYTVNENSQAILPCVADGIPTPAINWKKDNVLLANLLGKYTAEPYGELILENVVLEDSGFYTCVANNAAGEDTHTVSLTVHVLPTFTELPGDVSLNKGEQLRLSCKATGIPLPKLTWTFNNNIIPAHFDSVNGHSELVIERVSKEDSGTYVCTAENSVGFVKAIGFVYVKEPPVFKGDYPSNWIEPLGGNAILNCEVKGDPTPTIQWNRKGVDIEISHRIRQLGNGSLAIYGTVNEDAGDYTCVATNEAGVVERSMSLTLQSPPIITLEPVETVINAGGKIILNCQATGEPQPTITWSRQGHSISWDDRVNVLSNNSLYIADAQKEDTSEFECVARNLMGSVLVRVPVIVQVHGGFSQWSAWRACSVTCGKGIQKRSRLCNQPLPANGGKPCQGSDLEMRNCQNKPCPVDGSWSEWSLWEECTRSCGRGNQTRTRTCNNPSVQHGGRPCEGNAVEIIMCNIRPCPVHGAWSAWQPWGTCSESCGKGTQTRARLCNNPPPAFGGSYCDGAETQMQVCNERNCPIHGKWATWASWSACSVSCGGGARQRTRGCSDPVPQYGGRKCEGSDVQSDFCNSDPCPTHGNWSPWSGWGTCSRTCNGGQMRRYRTCDNPPPSNGGRACGGPDSQIQRCNTDMCPVDGSWGSWHSWSQCSASCGGGEKTRKRLCDHPVPVKGGRPCPGDTTQVTRCNVQACPGGPQRARGSVIGNINDVEFGIAFLNATITDSPNSDTRIIRAKITNVPRSLGSAMRKIVSILNPIYWTTAKEIGEAVNGFTLTNAVFKRETQVEFATGEILQMSHIARGLDSDGSLLLDIVVSGYVLQLQSPAEVTVKDYTEDYIQTGPGQLYAYSTRLFTIDGISIPYTWNHTVFYDQAQGRMPFLVETLHASSVESDYNQIEETLGFKIHASISKGDRSNQCPSGFTLDSVGPFCADEDECAAGNPCSHSCHNAMGTYYCSCPKGLTIAADGRTCQDIDECALGRHTCHAGQDCDNTIGSYRCVVRCGSGFRRTSDGLSCQDINECQESSPCHQRCFNAIGSFHCGCEPGYQLKGRKCMDVNECRQNVCRPDQHCKNTRGGYKCIDLCPNGMTKAENGTCIDIDECKDGTHQCRYNQICENTRGSYRCVCPRGYRSQGVGRPCMDINECEQVPKPCAHQCSNTPGSFKCICPPGQHLLGDGKSCAGLERLPNYGTQYSSYNLARFSPVRNNYQPQQHYRQYSHLYSSYSEYRNSRTSLSRTRRTIRKTCPEGSEASHDTCVDIDECENTDACQHECKNTFGSYQCICPPGYQLTHNGKTCQDIDECLEQNVHCGPNRMCFNMRGSYQCIDTPCPPNYQRDPVSGFCLKNCPPNDLECALSPYALEYKLVSLPFGIATNQDLIRLVAYTQDGVMHPRTTFLMVDEEQTVPFALRDENLKGVVYTTRPLREAETYRMRVRASSYSANGTIEYQTTFIVYIAVSAYPY

SEQ ID NO: 169 - DNA, 6947 bp, Homo sapiens
  CDS (27)..(6146)
gggctgaaagacacacagaagtcttcatggatatagttgatacatttaatcatttaattcctactgaacacttagatgatgccctatttctaggatccaacctggagaatgaagtctgtgaggattttagtgcaagtcaaaatgtcttagaggactcgctgaagaacatgctcagcgataaggatcctatgctaggatctgcaagtaaccagttctgtttgcctgttttggatagcaatgatcccaatttccagatgccttgttcaacagttgttggtcttgacgatattatggatgaaggagttgttaaagaaagtggcaatgataccattgatgaagaagaactgattttacctaacaggaacttaagggacaaggtagaagaaaattcagtgagatctccaagaaaatcacctcgtttaatggcacaagaacaagtaagaagtttgcgacagagcactattgccaagcgttcaaatgcagcaccattaagtaacacaaaaaaagcatctgggaagactgtatctactgctaaagcaggagtgaaacaaccagaaaggagtcaggttaaagaagaagtatgtatgtcactgaaacctgagtaccataaggagaatagaaggtgcagccgaaatagcggacaaattgaagtggtacctgaagtatcagtgtcttcaagtcattcttcagtgtcatcttgtcttgaaatgaaggatgaagatggattagattctaagcataagtgtaataatccgggagaaatagatgtgccatctcatgaattaaattgttcacttctttcagagacttgtgttactattggagaaaagaaaaatgaagctttgatggaatgtaaagccaagcctgttggtagtccattgtttaagttttcagataaagaagaacatgaacaaaatgattccatttcaggtaaaacgggtgagactgttgttgaagaaatgatagcaacaagaaaagttgaacaagattcaaaggagacagtaaaattatcccatgaagatgaccatattcttgaggacgctggatcttctgatatttctagtgatgctgcttgtacaaatccaaataagacagaaaacagccttgtaggtttgcctagttgtgtagatgaagtgactgaatgtaatttggaattgaaggataccatgggtattgctgataaaactgagaacacccttgaaagaaataaaattgaaccgttgggttattgtgaagatgcggagtctaataggcagttggagagcactgagtttaataaatcaaacttagaggtggttgatactagtacttttggaccggaaagtaatatcttggaaaatgctatttgtgatgtgcctgaccaaaattcaaaacagttgaatgctatagaaagtactaaaatagagtcccatgaaacagcaaaccttcaggatgacagaaacagccagtcaagtagcgtttcttacttagagtcaaaaagtgtaaaatccaaacatacaaaacctgtaattcattctaagcaaaacatgaccacagatgctccgaagaaaattgttgcagcaaagtatgaagtaatacatagcaaaactaaagttaatgtcaaaagtgtgaaacgaaatactgatgtaccagaatctcagcaaaattttcataggccagtcaaagtcagaaaaaaacaaattgataaggagccaaagattcagagttgcaattctggggttaaatctgtgaaaaaccaagctcattctgtactgaaaaaaacattacaggatcaaactttagtacaaattttcaagcccttaactcattctttgagtgataagtcacacgctcatcctggttgcttgaaagaacctcatcatcctgcacaaactggacatgtatcacattctagccagaaacagtgtcataagcctcagcaacaggccccagcaatgaaaaccaatagtcacgtgaaggaagagcttgaacacccaggcgttgagcattttaaggaagaggataaactgaaactgaaaaaacctgagaagaacctacaaccccgccaaagaagaagcagcaaaagtttttctttagatgagccaccattgttcattccagataacatagctaccataagaagagaaggctctgatcatagctcctcatttgaaagcaaatatatgtggactcccagcaagcagtgtgggttttgcaaaaaaccacatggcaacaggtttatggttggctgtgggagatgtgatgactggtttcatggtgattgtgttgggttaagtctttctcaagcacagcagatgggcgaggaagacaaagaatatgtctgtgtaaaatgttgtgctgaagaagacaaaaagactgaaatactagatccagatactttggaaaaccaagctacagttgaattccatagtggagataaaacaatggagtgtgaaaagcttggattatcaaaacacacaacaaatgatagaaccaaatatatagatgatacagtgaagcacaaggtcaaaattttaaaacgggagtctggtgaaggcagaaattcatcagactgtagagataatgaaattaaaaaatggcagctagctcctcttcgtaagatgggacaaccagttttacctcggagatcctcagaagaaaaaagtgaaaaaataccgaaagagtctacaactgttacttgcacaggagaaaaagcttcaaaaccaggtactcatgagaagcaagagatgaaaaagaagaaagttgaaaaaggagtgcttaatgtacatcctgctgcttctgcttccaagccttctgcagatcagatcaggcaaagtgtcagacattctctcaaagacattcttatgaagagacttacagactcaaatttgaaggtaccagaggaaaaggcagcaaaagttgccacaaaaattgagaaagagcttttctctttttttcgggacacagatgctaaatataagaacaaatatagaagtttgatgtttaatttgaaagatcctaaaaacaatatattatttaaaaaagtactgaaaggagaagtaactcctgatcatcttatcagaatgagtccagaagaactagcttctaaagagttagctgcttggagacgaagagaaaacagacataccatagaaatgattgagaaagagcagagagaagtggaacgacggccaatcaccaaaataactcataaaggtgaaatagaaattgagagtgatgccccaatgaaagaacaggaagcagccatggagattcaggaaccagccgccaataagtcattggagaagccagaaggatctgaaaaacaaaaagaggaggttgactctatgtctaaagataccactagtcaacacagacagcatctttttgatctcaactgcaaaatctgcataggtcgaatggcaccacctgtagatgatctttctccaaaaaaagtaaaagttgttgtaggagtagctcgcaaacattcagacaatgaagcagaaagtatagcagatgcattatcttcaacctcaaatattttggcttctgaattctttgaggaggagaaacaggagtctccaaagtcaacgttctctcctgctccacgtccagagatgcctggaactgttgaagttgagtctacctttctggctcgattgaacttcatctggaaaggttttatcaacatgccttctgtggcaaaatttgttaccaaagcctatccagtatctggctccccagaatacctgacagaggacctaccagatagtattcaagtaggtggcaggatatcacctcagacagtttgggattatgtggaaaaaataaaagcatcaggaaccaaggaaatttgtgtggttcgcttcacaccagtaactgaagaagatcaaatttcttatactttgctctttgcatacttcagtagcagaaagcgctatggagtagctgctaacaacatgaagcaggttaaagatatgtaccttattcctttgggtgccacagataaaattccacaccctcttgtgccttttgatggacctgggcttgaactgcatagacctaatctattgttgggcttaattattcgtcagaaactgaagcgacagcacagtgcctgtgctagtactagtcatatagctgagactcctgaaagtgcaccaccaatagcattgccacctgataaaaaaagtaaaatagaagtttctacagaagaagcaccagaggaagaaaatgacttttttaattcttttacaactgtattacacaagcagagaaataaacctcagcagaatcttcaggaagaccttccaacagcagttgaacctttaatggaagtcaccaaacaggagccaccaaaacctttaagatttcttcctggcgtgttgattggctgggagaatcaacctactactctggaattagcaaataaacctcttcctgtggatgatatacttcaaagccttttgggcaccactggtcaagtatatgaccaggcccagtcagtgatggaacaaaacactgttaaagaaattccatttttaaatgagcagaccaactcaaaaatagagaaaacagataatgtggaagtaactgatggtgaaaacaaggagataaaagttaaagtagataatatttcagaatctacagataagtcagcagaaatagaaacatcagtagtagggtcctcttccatttctgcagggtctttgacgagtcttagtctcagaggtaagccaccagatgtttctacagaagcatttttaacaaatttatcaattcagtcaaaacaagaggaaactgtggagagtaaagagaaaacattaaaaagacagcttcaggaagatcaagagaataatttgcaagataaccagacttcaaatagttctccatgcagatctaatgtaggaaaaggaaacatagatggtaatgtgagctgtagtgaaaaccttgttgctaatacagcgaggtctccacagtttatcaacctgaaaagggatcctaggcaagcagcaggacgaagtcagcctgtaactacttcagaaagcaaagatggagatagttgccggaatggagaaaaacacatgctgcctggcctgtcacacaacaaggagcacttaacagaacaaatcaatgtagaggaaaagttgtgttctgcagagaaaaactcgtgtgttcagcagagtgacaatttaaaagttgcacaaaactcaccatcagtagaaaacatacagacttctcaagcagaacaagcaaaacccttacaggaggatattttaatgcaaaatattgaaactgtgcacccatttcgaagaggatcagcagtagcgacatctcattttgaagttggaaacacatgtccatcagaatttccttctaaaagcatcacctttacttccagaagcaccagccccagaacaagtacaaacttttcacccatgaggccacagcagcccaaccttcagcatctcaagtctagcccacctggatttccatttccagggcctcctaattttcccccacaaagcatgtttggatttccaccacatttgccacctccattacttccccctccaggctttggctttgctcaaaatcccatggttccctggccacctgttgttcatctcccaggtcagccacagcgtatgatgggtcctctctcacaagcatcaaggtatataggcccgcagaatttttaccaggttaaagacattcggaggccagaaaggcgccatagtgacccttggggtaggcaagaccaacagcaactggataggccatttaataggggtaaaggggaccgccagagattttatagtgattcacaccatttgaaaagagagcgacatgaaaaggaatgggagcaagaatctgaaaggcatagacgcagagacagaagccaagacaaggacagagacagaaaaagcagggaggaagggcacaaagataaagagagggcacggttatcacatggtgatcgaggaacagatggaaaagcaagcagagatagtaggaatgtagacaagaagccagataaacctaaaagtgaagactatgagaaggacaaagaacgagagaaaagtaaacacagagaaggagaaaaggacagggataggtaccacaaagatagggaccacactgacagaactaaaagcaaaaggtaaaatttgcaggctgcttcaggattacatttaaataactgttaaaatgttgtatcttgtaaacaaaagaaagattgcctgctaggattgtgccatctttaaaatttttactattggtcatttgcagaacagtaaattctgtgtgttggtacagagtgctctgtaccagtgctcatcatcccttcttcataccaacggtccctagttataggaatttaatatttttaaaagttttacattgctgtatattcaaagatttgttttattaatatgcaataaaggcttagaaattttagttttattccttaattggtaaatatggttaactatggaatatatttacttcctctagtgaatgtcctttatataatgactaatttgggagtaatgtgtgctctgtaagtttgttttaaattgcactgtttttaaagaaactgtagaggagcaacaaaaatccaagcaacttcataatcagattatgctaatcatttagttgagcagtttttgaccaagaatcagaagcccaaggggtacatttattgctttaatctgcactcattgaagtcatttattaccatatactacagctttgtggtaggccattattttcattttcatttttggctcttcagaaacttgaatacttaagcttgtacatgatcttgtgttttgctatcctttttactgtaaaatgtaaatattttaagggatattttgattctaaatatgataaaataatttctcacctattttgtgtgtgtgacttgaaattcagtagtaaaagaatttcttctttaaagcttt

SEQ ID NO: 170 - protein, 2039 aa, Homo sapiens
MDIVDTFNHLIPTEHLDDALFLGSNLENEVCEDFSASQNVLEDSLKNMLSDKDPMLGSASNQFCLPVLDSNDPNFQMPCSTVVGLDDIMDEGVVKESGNDTIDEEELILPNRNLRDKVEENSVRSPRKSPRLMAQEQVRSLRQSTIAKRSNAAPLSNTKKASGKTVSTAKAGVKQPERSQVKEEVCMSLKPEYHKENRRCSRNSGQIEVVPEVSVSSSHSSVSSCLEMKDEDGLDSKHKCNNPGEIDVPSHELNCSLLSETCVTIGEKKNEALMECKAKPVGSPLFKFSDKEEHEQNDSISGKTGETVVEEMIATRKVEQDSKETVKLSHEDDHILEDAGSSDISSDAACTNPNKTENSLVGLPSCVDEVTECNLELKDTMGIADKTENTLERNKIEPLGYCEDAESNRQLESTEFNKSNLEVVDTSTFGPESNILENAICDVPDQNSKQLNAIESTKIESHETANLQDDRNSQSSSVSYLESKSVKSKHTKPVIHSKQNMTTDAPKKIVAAKYEVIHSKTKVNVKSVKRNTDVPESQQNFHRPVKVRKKQIDKEPKIQSCNSGVKSVKNQAHSVLKKTLQDQTLVQIFKPLTHSLSDKSHAHPGCLKEPHHPAQTGHVSHSSQKQCHKPQQQAPAMKTNSHVKEELEHPGVEHFKEEDKLKLKKPEKNLQPRQRRSSKSFSLDEPPLFIPDNIATIRREGSDHSSSFESKYMWTPSKQCGFCKKPHGNRFMVGCGRCDDWFHGDCVGLSLSQAQQMGEEDKEYVCVKCCAEEDKKTEILDPDTLENQATVEFHSGDKTMECEKLGLSKHTTNDRTKYIDDTVKHKVKILKRESGEGRNSSDCRDNEIKKWQLAPLRKMGQPVLPRRSSEEKSEKIPKESTTVTCTGEKASKPGTHEKQEMKKKKVEKGVLNVHPAASASKPSADQIRQSVRHSLKDILMKRLTDSNLKVPEEKAAKVATKIEKELFSFFRDTDAKYKNKYRSLMFNLKDPKNNILFKKVLKGEVTPDHLIRMSPEELASKELAAWRRRENRHTIEMIEKEQREVERRPITKITHKGEIEIESDAPMKEQEAAMEIQEPAANKSLEKPEGSEKQKEEVDSMSKDTTSQHRQHLFDLNCKICIGRMAPPVDDLSPKKVKVVVGVARKHSDNEAESIADALSSTSNILASEFFEEEKQESPKSTFSPAPRPEMPGTVEVESTFLARLNFIWKGFINMPSVAKFVTKAYPVSGSPEYLTEDLPDSIQVGGRISPQTVWDYVEKIKASGTKEICVVRFTPVTEEDQISYTLLFAYFSSRKRYGVAANNMKQVKDMYLIPLGATDKIPHPLVPFDGPGLELHRPNLLLGLIIRQKLKRQHSACASTSHIAETPESAPPIALPPDKKSKIEVSTEEAPEEENDFFNSFTTVLHKQRNKPQQNLQEDLPTAVEPLMEVTKQEPPKPLRFLPGVLIGWENQPTTLELANKPLPVDDILQSLLGTTGQVYDQAQSVMEQNTVKEIPFLNEQTNSKIEKTDNVEVTDGENKEIKVKVDNISESTDKSAEIETSVVGSSSISAGSLTSLSLRGKPPDVSTEAFLTNLSIQSKQEETVESKEKTLKRQLQEDQENNLQDNQTSNSSPCRSNVGKGNIDGNVSCSENLVANTARSPQFINLKRDPRQAAGRSQPVTTSESKDGDSCRNGEKHMLPGLSHNKEHLTEQINVEEKLCSAEKNSCVQQSDNLKVAQNSPSVENIQTSQAEQAKPLQEDILMQNIETVHPFRRGSAVATSHFEVGNTCPSEFPSKSITFTSRSTSPRTSTNFSPMRPQQPNLQHLKSSPPGFPFPGPPNFPPQSMFGFPPHLPPPLLPPPGFGFAQNPMVPWPPVVHLPGQPQRMMGPLSQASRYIGPQNFYQVKDIRRPERRHSDPWGRQDQQQLDRPFNRGKGDRQRFYSDSHHLKRERHEKEWEQESERHRRRDRSQDKDRDRKSREEGHKDKERARLSHGDRGTDGKASRDSRNVDKKPDKPKSEDYEKDKEREKSKHREGEKDRDRYHKDRDHTDRTKSKR

SEQ ID NO: 171 - DNA, 1290 bp, Homo sapiens
  CDS (628)..(1023)
ttagggtagaagaaaaggttttatttttctttctcacattggaaaaaatgaaaactttcggacccatgaaattttattacattttgccaaaaacagaaccaataacataagtattcaaagttatgtaaagataattatttaatatgaacattatgatggtgagagggaccacggagcaaggggctgccttgcaggcctgccttccagctttgctacagggaccagaagcgggagctgagcgcaggggaggcaggcggaggccatgggcagcgaggcgggtgcgccaaagggcgccagttccggagctgctgggcctgggctgcaggagggcggagctggggccgcaaggctggtgccggccgacaaacgacgcggcgcgggcgagtgggcggaggcggctgcggggaaggctgggctgccgcgggacgcggtgaagatagcctgcggagtgtccgggctgaacacggttgcagcactcccagtagaccaggagctccgggaggcagggccggccccacgtcctctgcgcaccaccctgagttggatcctctgtgcgccacctgagttggatccagggctagctgctgttgacctccccactcccacgctgccctcctgcctgcagccatgacgcccctgctcaccctgatcctggtggtcctcatgggcttacctctggcccaggccttggactgccacgtgtgtgcctacaacggagacaactgcttcaaccccatgcgctgcccggctatggttgcctactgcatgaccacgcgcacctctgcagccgaagccatatggtgtcaccagtgcacgggcttcggagggtgctcccatggatccagatgcctgagggactccacccactgtgtcaccactgccacccgggtcctcagcaacaccgaggatttgcctctggtcaccaagatgtgccacataggctgccccgatatccccagcctgggcctgggcccctacgtatccatcgcttgctgccagaccagcctctgcaaccatgactgacggctgccctcctccaggcccccggacgctcagcccccacagcccccacagcctggcgccagggctcacagctgcccctccctcgagactggccagcccacctctcccggcctctgcagccaccgtccagcaccgcttgtcctagggaagtcctgcgtggagtcttgcctcaatctgctgccgtccaagcctggggcccatcgtgcctgccgccccttcaggtcccgacctccccacaataaaatgtgattggatcgtgtggtacaa

SEQ ID NO: 172 - protein, 131 aa, Homo sapiens
MTPLLTLILVVLMGLPLAQALDCHVCAYNGDNCFNPMRCPAMVAYCMTTRTSAAEAIWCHQCTGFGGCSHGSRCLRDSTHCVTTATRVLSNTEDLPLVTKMCHIGCPDIPSLGLGPYVSIACCQTSLCNHD

SEQ ID NO: 173 - DNA, 2802 bp, Homo sapiens
  CDS (250)..(2343)
ggaaacgacattcggagctgcgctcccgcccaggccggccctgacgcgggcctcgtcagccagtaacagggagcagaggtgggagttagcgaggcgaccacgaaaacggtgaaggtcggaaccgacagcctcctccgagaagggcaggagctgggaggaggcggcagcggcggcggcagaaacagcagcggcggcggcggcggcagctgggaggaggtggtgacggtggcaacggcagcgtcggggacgatggcgcgactcgtggcagtgtgcagggacggggaggaggagttccccttcgagaggaggcagattcccctctacatagacgacaccctgacgatggtgatggaatttcctgataatgtgttaaatctcgatggacatcagaataatggtgcacagctaaagcagttcattcagcgacatggtatgcttaagcaacaggatctaagtattgccatggtggtgacatcacgcgaagtcctgagtgcactttctcagcttgtcccatgtgttggttgtcgtcgcagtgtggagcgtctcttttcccagcttgtagagtctggaaatcctgctcttgaacccctaacagtagggcccaagggagtcctgtctgtaactagaagctgcatgactgatgcaaagaagctttatacattattttatgtacatgggtccaaactaaatgacatgatagatgctattccaaaaagtaagaagaataagagatgtcagttgcactccttagatacgcacaagccaaaacctttgggaggttgttggatggatgtatgggaactaatgtcgcaggaatgcagggatgaagtagttttaattgactcgagttgtcttttagaaacactagaaacatatctgcgaaaacacaggttttgcactgattgcaaaaataaagtcctccgagcatacaatatccttattggtgaacttgactgcagcaaagaaaagggctactgtgctgcactttatgaaggcttgcggtgctgtccacatgaacgacacatacatgtttgctgtgaaacagacttcattgcacatcttttgggtcgtgctgagccagagttcgcaggagggcgaagagaaaggcatgcaaagacaatagatatagctcaagaagaagttctgacctgcttgggaattcatctttatgaaagactgcatcgaatctggcagaagctacgggcagaagagcagacatggcagatgcttttctatcttggtgttgatgctttacgcaagagttttgagatgaccgtggaaaaagtacagggtattagcagattggaacaactttgtgaggaattttcagaagaggaacgagtaagagaactcaagcaagaaaagaaacgccaaaaacggaagaatagacgaaaaaataagtgtgtgtgtgatattcctactcccttacaaacagcagatgaaaaggaagtaagccaagagaaggaaacagacttcatagaaaatagcagctgcaaagcctgtggcagcactgaagatggtaatacttgtgtagaagtaattgttaccaatgaaaatacatcatgtacctgtcctagcagtggcaatcttttggggtcccctaaaataaagaaaggcttatctccacactgtaatggtagtgattgtggatattcatctagcatggaagggagtgaaacaggttctcgggagggttcggatgttgcctgcactgaaggcatttgtaatcatgatgaacacggtgatgactcttgtgttcatcactgtgaagacaaagaggatgatggtgatagttgtgttgaatgttgggcaaattctgaagagaacgacacaaaaggaaaaaataaaaagaagaagaagaaaagcaagatactgaaatgtgatgaacatatccagaagcttggaagctgtattacagatccaggtaatcgagagacctcaggaaataccatgcacacagtgtttcaccgtgacaagaccaaagatacacatcctgaaagctgttgcagctctgaaaagggtgggcagccattgccttggtttgagcataggaaaaatgtaccacagtttgcagaacctacagaaacgttgtttggtcccgattccggaaaaggtgccaagagcttagttgaactccttgatgagtctgaatgtacttcagatgaggaaatctttatctcacaagatgaaatacagtcatttatggctaataaccagtctttctacagcaatagagaacaataccgacagcatctgaaggagaaatttaataaatactgccggttaaatgatcacaagaggcccatttgtagtggctggttgacaacggctggagcaaattaaataaataaaatagctctgtctttcaatgaaacactcacgatgactactgcgccttctctttcgaaaaactcttaatttagtgacttatggcaaaattttatcttaaatcaatgtgattctttcttgttttgggagacggtggaggtatcctcattagttctttcttcaggcttgtgtctttagttgcgtggctgcgcaggcctgccatatgatttaagccatctcttttcattaaatgtttctcttcctgtgagacttactaaagcaacttagtggcaaaaagtaatgttgtacttataattctgtacagaaatgacaatgagctgaatatatggttttacaaagtagacatccacttgcaaaatgtttggatgtaatgttaaagcgcaatgtgcaaaatttaaaataaagaatatttattaatacgcacagtaaaaaaaaaaaaaaaaaaaaaaaaaa

SEQ ID NO: 174 - protein, 697 aa, Homo sapiens
MARLVAVCRDGEEEFPFERRQIPLYIDDTLTMVMEFPDNVLNLDGHQNNGAQLKQFIQRHGMLKQQDLSIAMVVTSREVLSALSQLVPCVGCRRSVERLFSQLVESGNPALEPLTVGPKGVLSVTRSCMTDAKKLYTLFYVHGSKLNDMIDAIPKSKKNKRCQLHSLDTHKPKPLGGCWMDVWELMSQECRDEVVLIDSSCLLETLETYLRKHRFCTDCKNKVLRAYNILIGELDCSKEKGYCAALYEGLRCCPHERHIHVCCETDFIAHLLGRAEPEFAGGRRERHAKTIDIAQEEVLTCLGIHLYERLHRIWQKLRAEEQTWQMLFYLGVDALRKSFEMTVEKVQGISRLEQLCEEFSEEERVRELKQEKKRQKRKNRRKNKCVCDIPTPLQTADEKEVSQEKETDFIENSSCKACGSTEDGNTCVEVIVTNENTSCTCPSSGNLLGSPKIKKGLSPHCNGSDCGYSSSMEGSETGSREGSDVACTEGICNHDEHGDDSCVHHCEDKEDDGDSCVECWANSEENDTKGKNKKKKKKSKILKCDEHIQKLGSCITDPGNRETSGNTMHTVFHRDKTKDTHPESCCSSEKGGQPLPWFEHRKNVPQFAEPTETLFGPDSGKGAKSLVELLDESECTSDEEIFISQDEIQSFMANNQSFYSNREQYRQHLKEKFNKYCRLNDHKRPICSGWLTTAGAN

SEQ ID NO: 175 - DNA, 1647 bp, Homo sapiens
  CDS (215)..(1279)
agcggtggagcttggcataaagttcaaatgctcctacaccctgccctgcagtatctctaaccaggggactttgataaggaagctgaagggtgatattacctttgctccctcactgcaactgaacacatttcttagtttttaggtggcccccgctggctaacttgctgtggagttttcaagggcatagaatcgtcctttacacaattaaaagaagatgctgtttaatctgaggatcctgttaaacaatgcagcttttagaaatggtcacaacttcatggttcgaaattttcggtgtggacaaccactacaaaataaagtgcagctgaagggccgtgaccttctcactctaaaaaactttaccggagaagaaattaaatatatgctatggctatcagcagatctgaaatttaggataaaacagaaaggagagtatttgcctttattgcaagggaagtccttaggcatgatttttgagaaaagaagtactcgaacaagattgtctacagaaacaggctttgcacttctgggaggacatccttgttttcttaccacacaagatattcatttgggtgtgaatgaaagtctcacggacacggcccgtgtattgtctagcatggcagatgcagtattggctcgagtgtataaacaatcagatttggacaccctggctaaagaagcatccatcccaattatcaatgggctgtcagatttgtaccatcctatccagatcctggctgattacctcacgctccaggaacactatagctctctgaaaggtcttaccctcagctggatcggggatgggaacaatatcctgcactccatcatgatgagcgcagcgaaattcggaatgcaccttcaggcagctactccaaagggttatgagccggatgctagtgtaaccaagttggcagagcagtatgccaaagagaatggtaccaagctgttgctgacaaatgatccattggaagcagcgcatggaggcaatgtattaattacagacacttggataagcatgggacaagaagaggagaagaaaaagcggctccaggctttccaaggttaccaggttacaatgaagactgctaaagttgctgcctctgactggacatttttacactgcttgcccagaaagccagaagaagtggatgatgaagtcttttattctcctcgatcactagtgttcccagaggcagaaaacagaaagtggacaatcatggctgtcatggtgtccctgctgacagattactcacctcagctccagaagcctaaattttgatgttgtgttacttgtcaagaaagaagcaatgttcttcagtaacagaatgagttggtttatggggaaaagagaagagaatctaaaaaataaacaaatccctaacacgtggtatgggtgaaccgtatgatatgctttgccattgtgaaactttccttaagcctttaatttaagtgctgatgcactgtaatacgtgcttaactttgcttaaactctctaattcccaatttctgagttacatttagatatcatattaattatcatatacatttacttcaacataaaatactgtgttcataatgtataatgtctaagccattaagtgtaatctatgcttattacctaaataaattatcacccatgctaattta

SEQ ID NO: 176 - protein, 354 aa, Homo sapiens
MLFNLRILLNNAAFRNGHNFMVRNFRCGQPLQNKVQLKGRDLLTLKNFTGEEIKYMLWLSADLKFRIKQKGEYLPLLQGKSLGMIFEKRSTRTRLSTETGFALLGGHPCFLTTQDIHLGVNESLTDTARVLSSMADAVLARVYKQSDLDTLAKEASIPIINGLSDLYHPIQILADYLTLQEHYSSLKGLTLSWIGDGNNILHSIMMSAAKFGMHLQAATPKGYEPDASVTKLAEQYAKENGTKLLLTNDPLEAAHGGNVLITDTWISMGQEEEKKKRLQAFQGYQVTMKTAKVAASDWTFLHCLPRKPEEVDDEVFYSPRSLVFPEAENRKWTIMAVMVSLLTDYSPQLQKPKF

SEQ ID NO: 177 - DNA, 861 bp, Homo sapiens
  CDS (1)..(861)
atgttatttcgctgcaactatttagctttagctggtggtggaaaaaagccgaaataccctcccaacaaagtaatgatctgggatgacctgaagaagaagactgttattgaaatagaattttctacagaagtcaaggcagtcaaactgcggcgagatagaattgtggtggttttggactccatgattaaggtgttcacattcacacacaatccccatcagttgcacgtcttcgaaacctgctataaccccaaaggcctctgtgtcctttgtcccaatagtaacaactccctcctggcctttccgggcacgcacacgggccatgtgcagcttgtggacctggccagcacggagaagccacccgtggacattcctgcacacgagggtgtcctgagctgcattgcactcaacctgcagggaacaagaattgcaactgcatccgagaaagggacgcttataagaatatttgatacttcatcagggcatttaatccaggaactgcgaagaggatctcaagcagccaatatttactgcatcaacttcaatcaggatgcgtccctcatctgcgtatccagcgaccacggcacagtgcatatttttgcagctgaagatccaaaaaggaataaacagtccagtttggcctcagccagtttccttccaaaatacttcagttccaagtggagtttctccaagtttcaggttccctcaggctctccgtgcatttgtgcctttggaacagagccaaacgccgtcattgcaatttgtgcagacggcagctactacaaattcctgttcaaccccaagggggagtgcatccgagatgtctacgcgcagtttctagagatgaccgatgacaagctttaa

SEQ ID NO: 178 - protein, 286 aa, Homo sapiens [sequence omitted]

SEQ ID NO: 179 - DNA, 3581 bp, Homo sapiens
  CDS (181)..(1359)
cgagaagtgcttccaagcgtccattttgagccttggaaactacgacgaccaaagggccacgggttcatgggtcgtttctcatttccgtcgagttaaacgtctggggctgcttctgaggaatcagcttgactggccagcaagttcagctccggcaagtcatttgattcacccggtgatgaaatgggggtcaaccagtctgtgggctttccacctgtcacaggaccccacctcgtaggctgtggggatgtgatggagggtcagaatctccaggggagcttctttcgactcttctacccctgccaaaaggcagaggagaccatggagcagcccctgtggattccccgctatgagtactgcactggcctggccgagtacctgcagtttaataagcgctgcgggggcttgctgttcaacctggcggtgggatcttgtcgcctgcctgttagctggaatggcccctttaagacaaaggactctggataccccttgatcatcttctcccatggcctaggagccttcaggactttgtattcagccttctgcatggagctggcctcacgtggctttgtggttgctgtgccagagcacagggaccggtcagcggcaaccacctatttctgcaagcaggccccagaagagaaccagcccaccaatgaatcgctgcaggaggaatggatccctttccgtcgagttgaggaaggggagaaggaatttcatgttcggaatccccaggtgcatcagcgggtaagcgagtgtttacgggtgttgaagatcctgcaagaggtcactgctgggcagactgtcttcaacatcttgcctggtggcttggatctgatgactttgaagggcaacattgacatgagccgtgtggctgtgatgggacattcatttggaggggccacagctattctggctttggccaaggagacccaatttcggtgtgcggtggctctggatgcttggatgtttcctctggaacgtgacttttaccccaaggcccgaggacctgtgttctttatcaatactgagaaattccagacaatggagagtgtcaatttgatgaagaagatatgtgcccagcatgaacagtctaggatcataaccgttcttggttctgttcatcggagtcaaactgactttgcttttgtgactggcaacttgattggtaaattcttctccactgaaacccgtgggagcctggacccctatgaagggcaggaggttatggtacgggccatgttggccttcctgcagaagcacctcgacctgaaagaagactataatcaatggaacaaccttattgaaggcattggaccgtcgctcaccccaggggccccccaccatctgtccagcctgtaggcacaactggccatttgtaaagtcacttcagccaagttttcatttgggagctacccaagggcacccatgagctcctatcaagaagtgatcaacgtgaccccttttcacagattgaaaggtgtaatcacactgctgcttggataactgggtactttgatcttagatttgatcttaaaatcactttgggactgggatcccttgctgattgacaaacagactttctgggaccttgatggagtggggaacaagcagtagagtgggactgggggagacccaggccccgggctgagcactgtgaggcctggatgtgaagactcagcccagcgaagctcattcccttacccccggccagtgctgctgcttcagtggaagagatgaagccaaaggacagaatgaaaatccctaccttcagagactctagcccagcccaacaccatctcttcctacctctcagccttctccctccccagggccacttgttgaagtctgagcactttatgtaaatttctaggtgtgagccgtgatcacattttctatttatttccaagtcttctcattgtatggaacatagtactacttatacttacagtagtaagttatacttgtgagcccacagagtggcagacagcatggctctcacagcacagggagaaaaactgaggtacacagaggtacctcagaagctctggatgtctttgggggttttgctaagtgtatcttgataggaaacaacaaaagcaggttgagatggggaagatgacagaacaacagtgttaaatggccatttgcacaggcctttgccacaacagagaagtagtttggtcagctaaaactcagctgcagcctggacagtagagcgagaccccatcttaaaaataaagaaggctgggcgtggtggctcatgcctgtaatcccaacactttgggaggccaaggcaggcagatcacttaaggccaggagttcaagaccacctggccaacatggtgaaaccccgtctctactaaaaatacaaaaaattagcctggcgtaatggcaggcgcctataatcccagctactcaggaggctgaagcagaagaatcacttgaacctaggaggcggaggttgcagtgagtcaagatcgcgccactgcactccagcctgggtgacagagcaagactctgtcttaaaaaaaaaaaaaagaaaaagaaaaatttaaaataaataaaatttaaaaacgcagaaggccactcccagagaggcctaggagtaccttggtcattttttcttgcctcaaatattataaacctccaacttgctcagaatcagggtgcttttattgtctgttttctggctctgaggcccttgccccaaatttaagtcagatacagactgaatttccattctgttctgtttataatatgaatgatattaatactcttgtttgcttaatgttatgttggaattttctgtttaatctgcagtagagcaagatggagagccatctggaattgacttccttctgtctttcttctgtgttcgcttactacttgggcccatgtgggaaaaaaactttaaaaggaaggaagtcttcttagggatccagttcaaagctatttgggggcatcaaactgaaactctcttctccactactcaagacttcgtgcctcagtccaagtaggtaagagcaaaagggaaatgcatctctacacaatggcccatggtcagggccaccagagcaagctgggcctagatctccacctgtcagtgactggccattctaagaggtgaaacagcagatcgttgaggctgtgagggaggatctttgaattcccatgagacatagcataagaagggtatcattaaagccctgggctctaaagttacagagcctggttttgagtcctggctccaccactgccaactgggtaaatttgagcaaatggtattctctttcttatctcagctcctgcgtttctaaaatgagggtctgcgttatgaatagttaggaggattaagtgagaggatgtataacccatgggttacttaaaagtatatttcctaccttccaaacatgagatttttctagttatagtttcttttctagcttgattgctttgtggtcagagaaaatgacccatatggtttccatccttcaaaatttgttgaaacttggttgttggcctagtatgagatcaatgttgtaaatgtgccatgtatgtttaaaaagactatatattctgaa

SEQ ID NO: 180 - protein, 392 aa, Homo sapiens
MGVNQSVGFPPVTGPHLVGCGDVMEGQNLQGSFFRLFYPCQKAEETMEQPLWIPRYEYCTGLAEYLQFNKRCGGLLFNLAVGSCRLPVSWNGPFKTKDSGYPLIIFSHGLGAFRTLYSAFCMELASRGFVVAVPEHRDRSAATTYFCKQAPEENQPTNESLQEEWIPFRRVEEGEKEFHVRNPQVHQRVSECLRVLKILQEVTAGQTVFNILPGGLDLMTLKGNIDMSRVAVMGHSFGGATAILALAKETQFRCAVALDAWMFPLERDFYPKARGPVFFINTEKFQTMESVNLMKKICAQHEQSRIITVLGSVHRSQTDFAFVTGNLIGKFFSTETRGSLDPYEGQEVMVRAMLAFLQKHLDLKEDYNQWNNLIEGIGPSLTPGAPHHLSSL

SEQ ID NO: 181 - DNA, 6488 bp, Homo sapiens
  CDS (1)..(2535)
atgtccaagaggggcatgagcagccgggccaagggggacaaggcagaggccctcgcggcgctgcaggcggccaacgaggatcttcgagccaagctcacagacatccagatcgagctgcagcaggagaagagcaaggtcagcaaagtggaacgcgagaagaaccaggagctgcggcaggtgcgcgagcatgagcagcataagaccgcggtcttgctcacggagctcaagacaaagctgcacgaggagaagatgaaggagctacaggctgtgcgtgagacgctgctgcggcagcatgaggctgagctgctcagggtcatcaagatcaaggacaacgagaaccagcggctgcaggcactgctcagtgccctgcgtgatggcggccccgaaaaggtcaagaccgtgctgctgtccgaggccaaggaggaggccaagaaggggttcgaggtggagaaggtcaagatgcagcaggagatctccgagctcaagggcgccaaaaggcaggtggaggaggcgctgacgctggtgatccaagcggacaagatcaaggccgcagagatccgcagcgtgtaccacctgcaccaggaggagatcacccgcatcaagaaggagtgcgagcgggagatccgcaggctgatggaggagataaaatttaaagacagagcagtcttcgtgctggagagagagttaggggttcaagccgggcatgctcagagactgcagctccaaaaagaggctctagatgagcagctgtcccaggtccgagaggccgaccggcacccgggcagccccagacgggaacttcctcatgcagctggtgcaggagacgcttcagaccactcgggaagccctgaacagcagttggatgaaaaagatgcccggcgcttccagcttaaaatcgcggagttaagtgcgattatccgcaaactggaggaccgcaatgcattgctgtcggaagagaggaatgagctgttgaagcgcgtaagagaagctgagagtcagtacaagcctctgctggataaaaacaagcgcctcagtcggaagaacgaggatttgtctcatgctttacgccgaatggaaaacaagttaaaatttgtcacccaggagaacatagaaatgagacagagagctggaatcatacggagacccagttccttgaatgaccttgatcaaagtcaggatgagagagaagtcgatttcttgaagcttcagattgtggagcagcaaaacctcatagatgaactgtctaagacccttgagaccgccggctacgtgaagagcgtgttagagcgggacaagctgttaagattccggaagcaaagaaagaaaatggcaaaacttcccaagccggtggttgtggagaccttctttggatacgacgaagaggcttccctggaatccgacggctcctccgtctcttaccaaacagacaggacggaccagaccccgtgcaccccggacgatgacttggaggagggcatggccaaggaggagacggagctgaggttccggcagctgaccatggagtaccaggccctgcagcgtgcctacgctttgttgcaggagcaggttggagggacgctggacgcagagcgagaagttaagacccgtgagcagctacaagccgaagtgcagagggcacaggcgcggatagaggacctggagaaggccctggcggagcaggggcaggatatgaagtggattgaagagaagcaggcactgtaccggagaaatcaagagcttgtggaaaagatcaaacaaatggagacggaagaggctcggctcagacacgaggtgcaggacgccagagaccaaaacgagctgctggagttcaggatcctggagcttgaggagagggagaggaagtcacccgccatcagcttccaccacacgcccttcgtggacgggaagagccccctccaggtgtactgcgaggccgaaggtgtgacggacattgtggttgcggagctgatgaagaagctggacatcctgggcgataacgccaacctgaccaatgaggagcaggtggttgtcatacaagccaggacagtcctgaccttggccgaaaagtggctccagcagattgaggagacagaggcggcgctgcagcggaagatggtggatctggagagcgagaaggagctgttcagtaagcagaagggctacctggacgaggagctggactaccggaaacaggccttggaccaggccaacaagcacatcctggagctggaagccatgctgtatgatgccctgcagcaggaggccggggctaaggtggctgagctgctgtcagaggaggagcgcgagaagctcaaggtggccgtggagcagtggaagcgccaggtcatgagtgagctgcgcgagcgggacgcccagatcctgcgggagcgcatggagctgctgcagctggctcagcagagaattaaagagttagaagaaagaatagaagctcagaagagacaaataaaggaactggaggaaaagtttctatttttgttcttatttttctccttagctttcattctctggtcatagtccgtcttggcaccctgacgtgccccacattgaatcggacccttttcctccagtgggaccagaaagcagggacaaaatgggacgtcgcgtctccatcctgaagacccagggagatttggtctctgcacgcccgtcccgtggaggaagagtgagaaggggcagtgtgtggggcgtggagctgccgtccacgtgggatgtgccagaactagaactggctctgccgacttctcgggggcttctccgggacgggcctggccttggctgctggaccctgggtcccttctcccggacggcagcccccatcccatttccagggatgtgtagcattccctgccaagcaggggtgagaactgcttctgtgcagaagcaccagccgcgggtcccctcctctctcttggttctcacagtagctgccactggtgtctggaggaagattttcagaaacaacagaggcttggcctgatgacaagatgaaagctggacggtgaccttcattcaggggaacctggaggctccctgggatggtcctgggagggctccccgacgcctcaggggcccctccgatgctgcaatatgttgctggggtcctgagcacccgctggccaacagaccccacatccaccctcgttcatcatcatctctgtggggacagacaagagccgtggccgccgcgggccgcgtggtgccatcaaccctctgcctccctactcaacctgagacaggaaggccaagatcccgcccaagccgccagctgggagcaccgcgggactgagccaaggaaggcgtggggagcgtggtgacaggaggtgggacgagggggcggagctggctggaacacggatgccagaggctgcctccatagtgaatctccagaagtcacagaggccctgggcacccagagccacccagcctggaagcccctgcacgggccagccctgcaggccatggaccccggcgggcaccgaagcctcaccccaagcctttgcacacaaggagcagcccaggtggggatggcgggcgcaagaagggaaccgcggggacggcctttcccctcccgccctgtgtggggacgctgcacgagccgtggaccaagaggctgacaggaggggtccgcagcgaggaggaggtgcgaagggggcggcggctccgtcttgcaggtcccctggggcgcgttcttcaggtgcgtggtggacgaggcggcgtcctcgcggggtcgggacctgggtacccagcagcatctggctcctgcatccaccaagggcgcccaggcacagcctcaggccagaaggttcgctgcagaggttcattctagaaggagcgggagaccagcagtcccagccctgtccaaggacgcccgctgcttggcacacgagggcgccgcaggcccaccatccctcaggacatggctgccgagtccccagagacttctggtcccacagcaagagctggagctccaagcataacatctctaactgtgcggcaaggacagcgcagccagagagaggaagcagtgcattggtgaaggcaacgttaggtgtgatttccattcctgctgggagacccgggacgcagcccgggagcttcgtccagcctgtggatggagcctgactggctgcagatggaacttctgtgtcctcccaccctaggtgggctaaggttctgctctcagagctgaattgacaggaggtgtgtgtgtgtgctcacttgtgtgcacaagcatgcgtttatgcatgttttcacgcaaccagaagagccattcgtgggatttagccatttcgaggcacctagaagttgaggcagccagctgtgcagccaggtgtgactgttactggcagcattgtataaaagacacgactcagctgccgtagggaggactgggttgtctggaagtattaggctcattttatatttgtgtcagaagaaatgtctgactttggggcagatgacacggtggctgcggaccaggcatggctccctaggttgaaatcagggaaaagctaatagtatcagacagatatgctttttctttggtggctgcaggatttttgctggaaaatgcactattaatcagcacttgtccaagaaagacccatccatttctgttgtcattcaagccacagttcctgatttactcggcaagatactgggccagttcagtgtctctagctgagcctgacctcggggtttgcgtctcgagtctgaaatcctgtttagtcctctgtgcatagttttgtctcattttaacgactgcatcttcttggcacatttattatactcacaactgaatggcacacaatagccttgtgttaataaaagctaccgtggcgctgtgggtgaaccgctgggttgaagtccgatggactctacgatgcaggcatccagaaatatgttgtaactctacctggctccctgccagcctggcctcctcctctgggagagctcctggcatggtcccaatgtgtacctgcatgggaacaacagctgcatgggccagctgtttcggatctaaagatgtgcagtgaaactcacattcccagattcacatccctcatgtttatttgggtcatcatggtttagcatgttgtatatatgtctggagcacttcatacacctctatccaccacagacactcttaatcacagttctgtaataataataaggcaaactatacggcaaagagaagcatgtaaatatgtaccaaatccttatgaagttgtaattgtttatatgtaaaaagtatgtatataggaacgggagaaggtgcaaggaatgtgctgaataacatccaaactgcatcgcgtctctgccccattcctgaaagcacacatctagttggagcgtcagttcctctccttagatatcattgttttcactcgtctatcataggcaccttctttacatctgattacaatacccagcatttcagaactgggtttttgcccccaaaaaggtaaatatgagcatttatcactgactcctcctggtccagtgagcagcagcagaattcaagtatttaaaaataaggtgcatttctaaattgcaggctataccttcttttccaaaccaatgggctagagtgaatttcctccaagtacttgggctgtcttactgctagctcttctaacaggggaagtctgtatgaatgcatcaccccctaataaggcaagaggaaggaccctgaaatgttgccagaaatgtactgttacatcaacatttacattatattaacatcatcacactctgtgttcaacacacagaacaacatagatactttagtttgtctaaagtaaaaatccacataaatagcagattcctttgttgacaccagtgtgttgtttaccttgtgcccatggtccagattttgagctggagaaggactatggctgttccttaaagtctctgcccttgcagaatctgtagccttcaggataccccgagtgccttacagggcttgtgaacaccgatactagaagtcaaaaagaagagagtgcccaagtgtgggtttggaggcactgacgcattcgccaactcaccgtcatcccatccttgaaaccctgagagagagtgtgtgttttatcacagtaatggaattcagtttagcctcaggaaactcatattgtgaatataggtatcaaatcatatatttgtttactgtatattttttaaaaagctttattgtaaatttatgcaaaaactaaccgggcctgttttcttacggcggcatgccaggtagtgtgtgtattctcccaggcactcccttcatagtcaccctctaaccacgtgacattccgttccatgctaagcagtattcacaggcctaaaataggtttgtatggtgatctacaagattttacaaatatttttgtattgtgattcctatgatatataccagagaattttttactcgtttgtaaattattgtacagttttaataaaaaatgttttaaatctta

SEQ ID NO: 182 - protein, 844 aa, Homo sapiens
MSKRGMSSRAKGDKAEALAALQAANEDLRAKLTDIQIELQQEKSKVSKVEREKNQELRQVREHEQHKTAVLLTELKTKLHEEKMKELQAVRETLLRQHEAELLRVIKIKDNENQRLQALLSALRDGGPEKVKTVLLSEAKEEAKKGFEVEKVKMQQEISELKGAKRQVEEALTLVIQADKIKAAEIRSVYHLHQEEITRIKKECEREIRRLMEEIKFKDRAVFVLERELGVQAGHAQRLQLQKEALDEQLSQVREADRHPGSPRRELPHAAGAGDASDHSGSPEQQLDEKDARRFQLKIAELSAIIRKLEDRNALLSEERNELLKRVREAESQYKPLLDKNKRLSRKNEDLSHALRRMENKLKFVTQENIEMRQRAGIIRRPSSLNDLDQSQDEREVDFLKLQIVEQQNLIDELSKTLETAGYVKSVLERDKLLRFRKQRKKMAKLPKPVVVETFFGYDEEASLESDGSSVSYQTDRTDQTPCTPDDDLEEGMAKEETELRFRQLTMEYQALQRAYALLQEQVGGTLDAEREVKTREQLQAEVQRAQARIEDLEKALAEQGQDMKWIEEKQALYRRNQELVEKIKQMETEEARLRHEVQDARDQNELLEFRILELEERERKSPAISFHHTPFVDGKSPLQVYCEAEGVTDIVVAELMKKLDILGDNANLTNEEQVVVIQARTVLTLAEKWLQQIEETEAALQRKMVDLESEKELFSKQKGYLDEELDYRKQALDQANKHILELEAMLYDALQQEAGAKVAELLSEEEREKLKVAVEQWKRQVMSELRERDAQILRERMELLQLAQQRIKELEERIEAQKRQIKELEEKFLFLFLFFSLAFILWS

SEQ ID NO: 183 - DNA, 1443 bp, Homo sapiens
  CDS (118)..(1323)
aaccattgtgatggtctagataagtgtacatgcttaggccttctgaagcagcatttgaagctgcagtcctgaaaaccatgcaggccggaagagtagataaagaaatatttatttgagatggcacatgtttcttcagaaactcaagatgtttcccccaaagatgaattaactgcttcagaagcctccactaggtctccattgtgtgaacacaccttccctggggactcagacttacggtcaatgattgaagaacatgcttttcaggttttgtcacaaggatccttgttagaaagtccaagttacacagtttgtgtctctgagccagataaagatgatgattttctttctctgaactttcccaggaaactttggaaaatagtggaaagtgaccaattcaagtctatttcatgggatgagaatggaacttgcatagtgattaatgaagaactcttcaagaaagaaattttggaaacaaaggctccttacagaatatttcaaactgatgctatcaaaagttttgttcgacagctcaacctttatggatttagtaaaattcaacagaattttcaaagatctgcctttctagccacctttctgtcagaagagaaagaatcgtctgtcttaagcaagttaaagttctattataatccaaatttcaagcgtggctatccccaacttttagtaagagtgaagagaagaattggtgttaaaaatgcttcacctatatctactttattcaacgaagatttcaacaagaagcattttagagcaggggctaacatggagaatcataattctgccttagctgctgaagctagtgaagaaagtttattttcagcctctaaaaatttaaatatgcctctaacaagggaatcttctgtcagacagataattgcaaattcatctgtccccattagaagtggtttccctcctccttcaccttcaacctcagttggaccatcagaacaaattgcaacagatcaacatgctattttaaatcagttgaccactattcatatgcactctcatagtacctacatgcaagcaaggggccacattgtgaattttattacaaccacaacttctcaataccacatcatatctcccttacaaaatggttattttgggctgacagtggaaccatctgctgttcccacacgatatcctctggtatcagtcaatgaggctccatatcgtaacatgctaccagcaggcaacccgtggttgcaaatgcctacgatcgctgatagatcagctgcccctcattccaggctagctcttcaaccatcaccactggacaaatatcaccctaattacaactgatctgccattaaaagaggaccagattatgaatgacaacagagactaacatttacattgacaaaaaaccctaaaaatttctgcaattatcttattgaacaataaaattgcatgtttacttct

SEQ ID NO: 184 - protein, 401 aa, Homo sapiens
MAHVSSETQDVSPKDELTASEASTRSPLCEHTFPGDSDLRSMIEEHAFQVLSQGSLLESPSYTVCVSEPDKDDDFLSLNFPRKLWKIVESDQFKSISWDENGTCIVINEELFKKEILETKAPYRIFQTDAIKSFVRQLNLYGFSKIQQNFQRSAFLATFLSEEKESSVLSKLKFYYNPNFKRGYPQLLVRVKRRIGVKNASPISTLFNEDFNKKHFRAGANMENHNSALAAEASEESLFSASKNLNMPLTRESSVRQIIANSSVPIRSGFPPPSPSTSVGPSEQIATDQHAILNQLTTIHMHSHSTYMQARGHIVNFITTTTSQYHIISPLQNGYFGLTVEPSAVPTRYPLVSVNEAPYRNMLPAGNPWLQMPTIADRSAAPHSRLALQPSPLDKYHPNYN

SEQ ID NO: 185 - DNA, 3537 bp, Homo sapiens
  CDS (328)..(2448)
ggcccctcgagcctcgaaccggaacctccaaatccgagacgctctgcttatgaggacctcgaaatatgccggccagtgaaaaaatcttgtggctttgagggcttttggttggccaggggcagtaaaaatctcggagagctgacaccaagtcctcccctgccacgtagcagtggtaaagtccgaagctcaaattccgagaattgagctctgttgattcttagaactggggttcttagaagtggtgatgcaagaagtttctaggaaaggccggacaccaggttttgagcaaaattttggactgtgaagcaaggcattggtgaagacaaaatggcctcgccggctgacagctgtatccagttcacccgccatgccagtgatgttcttctcaaccttaatcgtctccggagtcgagacatcttgactgatgttgtcattgttgtgagccgtgagcagtttagagcccataaaacggtcctcatggcctgcagtggcctgttctatagcatctttacagaccagttgaaatgcaaccttagtgtgatcaatctagatcctgagatcaaccctgagggattctgcatcctcctggacttcatgtacacatctcggctcaatttgcgggagggcaacatcatggctgtgatggccacggctatgtacctgcagatggagcatgttgtggacacttgccggaagtttattaaggccagtgaagcagagatggtttctgccatcaagcctcctcgtgaagagttcctcaacagccggatgctgatgccccaagacatcatggcctatcggggtcgtgaggtggtggagaacaacctgccactgaggagcgcccctgggtgtgagagcagagcctttgcccccagcctgtacagtggcctgtccacaccgccagcctcttattccatgtacagccacctccctgtcagcagcctcctcttctccgatgaggagtttcgggatgtccggatgcctgtggccaaccccttccccaaggagcgggcactcccatgtgatagtgccaggccagtccctggtgagtacagccggccgactttggaggtgtcccccaatgtgtgccacagcaatatctattcacccaaggaaacaatcccagaagaggcacgaagtgatatgcactacagtgtggctgagggcctcaaacctgctgccccctcagcccgaaatgccccctacttcccttgtgacaaggccagcaaagaagaagagagaccctcctcggaagatgagattgccctgcatttcgagccccccaatgcacccctgaaccggaagggtctggttagtccacagagcccccagaaatctgactgccagcccaactcgcccacagagtcctgcagcagtaagaatgcctgcatcctccaggcttctggctcccctccagccaagagccccactgaccccaaagcctgcaactggaagaaatacaagttcatcgtgctcaacagcctcaaccagaatgccaaaccagaggggcctgagcaggctgagctgggccgcctttccccacgagcctacacggccccacctgcctgccagccacccatggagcctgagaaccttgacctccagtccccaaccaagctgagtgccagcggggaggactccaccatcccacaagccagccggctcaataacatcgttaacaggtccatgacgggctctccccgcagcagcagcgagagccactcaccactctacatgcaccccccgaagtgcacgtcctgcggctctcagtccccacagcatgcagagatgtgcctccacaccgctggccccacgttccctgaggagatgggagagacccagtctgagtactcagattctagctgtgagaacggggccttcttctgcaatgagtgtgactgccgcttctctgaggaggcctcactcaagaggcacacgctgcagacccacagtgacaaaccctacaagtgtgaccgctgccaggcctccttccgctacaagggcaacctcgccagccacaagaccgtccataccggtgagaaaccctatcgttgcaacatctgtggggcccagttcaaccggccagccaacctgaaaacccacactcgaattcactctggagagaagccctacaaatgcgaaacctgcggagccagatttgtacaggtggcccacctccgtgcccatgtgcttatccacactggtgagaagccctatccctgtgaaatctgtggcacccgtttccggcaccttcagactctgaagagccacctgcgaatccacacaggagagaaaccttaccattgtgagaagtgtaacctgcatttccgtcacaaaagccagctgcgacttcacttgcgccagaagcatggcgccatcaccaacaccaaggtgcaataccgcgtgtcagccactgacctgcctccggagctccccaaagcctgctgaagcatggagtgttgatgctttcgtctccagccccttctcagaatctacccaaaggatactgtaacactttacaatgttcatcccatgatgtagtgcctctttcatccactagtgcaaatcatagctgggggttgggggtggtgggggtcggggcctgggggactgggagccgcagcagctccccctcccccactgccataaaacattaagaaaatcatattgcttcttctcctatgtgtaaggtgaaccatgtcagcaaaaagcaaaatcattttatatgtcaaagcaggggagtatgcaaaagttctgacttgactttagtctgcaaaatgaggaatgtatatgttttgtgggaacagatgtttcttttgtatgtaaatgtgcattcttttaaaagacaagacttcagtatgttgtcaaagagagggctttaatttttttaaccaaaggtgaaggaatatatggcagagttgtaaatatataaatatatatatatataaaataaatatatataaacctaaaaaagatatattaaaaatataaaactgcgttaaaggctcgattttgtatctgcaggcagacacggatctgagaatctttattgagaaagagcacttaagagaatattttaagtattgcatctgtataagtaagaaaatattttgtctaaaatgcctcagtgtatttgtatttttttgcaagtgaaggtttacaatttacaaagtgtgtattaaaaaaaacaaaaagaacaaaaaaatctgcagaaggaaaaatgtgtaattttgttctagttttcagtttgtatatacccgtacaacgtgtcctcacggtgccttttttcacggaagttttcaatgatgggcgagcgtgcaccatccctttttgaagtgtaggcagacacagggacttgaagttgttactaactaaactctctttgggaatgtttgtctcatcccattctgcgtcatgcttgtgttataactactccggagacagggtttggctgtgtctaaactgcattaccgcgttgtaaaatatagctgtacaaatataagaataaaatgttgaaaagtcaaactggaaaaaaaa

SEQ ID NO: 186 - protein, 706 aa, Homo sapiens
MASPADSCIQFTRHASDVLLNLNRLRSRDILTDVVIVVSREQFRAHKTVLMACSGLFYSIFTDQLKCNLSVINLDPEINPEGFCILLDFMYTSRLNLREGNIMAVMATAMYLQMEHVVDTCRKFIKASEAEMVSAIKPPREEFLNSRMLMPQDIMAYRGREVVENNLPLRSAPGCESRAFAPSLYSGLSTPPASYSMYSHLPVSSLLFSDEEFRDVRMPVANPFPKERALPCDSARPVPGEYSRPTLEVSPNVCHSNIYSPKETIPEEARSDMHYSVAEGLKPAAPSARNAPYFPCDKASKEEERPSSEDEIALHFEPPNAPLNRKGLVSPQSPQKSDCQPNSPTESCSSKNACILQASGSPPAKSPTDPKACNWKKYKFIVLNSLNQNAKPEGPEQAELGRLSPRAYTAPPACQPPMEPENLDLQSPTKLSASGEDSTIPQASRLNNIVNRSMTGSPRSSSESHSPLYMHPPKCTSCGSQSPQHAEMCLHTAGPTFPEEMGETQSEYSDSSCENGAFFCNECDCRFSEEASLKRHTLQTHSDKPYKCDRCQASFRYKGNLASHKTVHTGEKPYRCNICGAQFNRPANLKTHTRIHSGEKPYKCETCGARFVQVAHLRAHVLIHTGEKPYPCEICGTRFRHLQTLKSHLRIHTGEKPYHCEKCNLHFRHKSQLRLHLRQKHGAITNTKVQYRVSATDLPPELPKAC

SEQ ID NO: 187 - DNA, 2072 bp, Homo sapiens
  CDS (54)..(944)
cgccgtgcccgcggagagagcgcggcgcgggaggccggcggccggccggctgcatggcgcgctgcgagaggctgcgcggagcggccctgcgcgacgtgctgggccgggcgcagggggtcctgttcgactgtgacggggtgctgtggaacggcgagcgcgccgtgccgggcgccccggagctgctggagcggctggcgcgggccggcaaggcggctctgtttgtgagcaacaacagccggcgcgcgcggcccgagctggccctgcgcttcgcgcgcctcggcttcggggggctgcgcgccgagcagctcttcagctccgcgctgtgcgccgcgcgcctgctgcgccagcgcctgcccgggcctccggacgcgccgggcgccgtgttcgtgctgggcggcgaggggctgcgcgccgagctgcgcgccgcggggctgcgcctggccggggacccgagcgcgggggacggcgcggccccgcgcgtgcgcgccgtgcttgtgggctacgacgagcacttctccttcgccaagctgagggaggcgtgcgcgcacctgcgcgaccccgagtgcctactcgtggccaccgaccgtgacccatggcacccgctgagcgacggcagccggacccctggcaccgggagcctggccgctgcagtggagacagcctcgggacgccaggccctggtggtgggcaagcccagcccctacatgttcgagtgcatcacggagaacttcagcatcgaccccgcacgcacgcttatggtgggtgaccgcctggagaccgacatcctctttggccaccgctgcggcatgaccactgtgctcacgctcacaggagtctcccgcctagaagaggcccaggcctacctagcggccggccagcacgacctcgtgccccattactatgtggagagcatcgcagacttgacagaggggttggaggactgagcccactgcacctgcagccacaggcccacccctccccactccctgatcccgtaggtggaggcgatgggtcacgagccatgttaagcacaaccggctccttggtccagttctgcaccggggtggggctgggacccggggaaggtttgagggcccttgcaaccccctcccagcagtggctgggcactctttgctgccccagaagctggtcccctatggattcatcttggcctgacccagccaggtggccttatttcttccctgtcacctcccctccttgaaatctgggccctggtgcctgctgaagattccctctatccctgagtacttagtcttctcccccttccctggggcttctagagctctctctgcccctcaggtcctggcccttgggtccttgtcaaccagaggtctagggaaccacaacccttattgtcctgggtggaccaatccaaaggctaagtgatagtgactcatcaatgttgggtcctgtggggtaccagtttaggttcctaagtaatagtgaccctttcacgtcctggagcccgagtggaccaatcggaagcctaagtgacgatgaccctcgcatgtcctaggtccctgggtggacccatcaggaccccaagtgatagtgacccagtggtcttttagatcctcagtagaacagtccagaagcctgagagacagtggccccttgataatctgggtctcacgggaccagctaggggtccaggtttcagtcagtaaataagagtggtccacgtcctaaagacacctctcctttacaaagacttgtgatgctctggggcttctgtggccaagccccaccctttcctggtcatggtacccgtacagcgttgatggccacagctcgaaggggggctttcgtgtccccctgtgcggtcagtgttttcagtaccacctctctcccgtgcccacttggctatttacttatttatttattgtgtgccagtgatggtgggtgggggctgggccttccccgccacctccacccctgttgtgacctgtccttccgtacttaataaagtgcgcgtgggagtgttaaaaaaaaaaaaaaaaaaaaaaaaaaaaaaaaaaaaaaaaaaaaaaaaaaaaaaaaaaaaaaaaaaa

SEQ ID NO: 188 - protein, 296 aa, Homo sapiens
MARCERLRGAALRDVLGRAQGVLFDCDGVLWNGERAVPGAPELLERLARAGKAALFVSNNSRRARPELALRFARLGFGGLRAEQLFSSALCAARLLRQRLPGPPDAPGAVFVLGGEGLRAELRAAGLRLAGDPSAGDGAAPRVRAVLVGYDEHFSFAKLREACAHLRDPECLLVATDRDPWHPLSDGSRTPGTGSLAAAVETASGRQALVVGKPSPYMFECITENFSIDPARTLMVGDRLETDILFGHRCGMTTVLTLTGVSRLEEAQAYLAAGQHDLVPHYYVESIADLTEGLED

SEQ ID NO: 189 - DNA, 2102 bp, Homo sapiens
  CDS (81)..(1181)
acacccagctgcctgagaccctccttcaacctccctagaggacagccccactctgcctcctgctcccccagggcagcaccatgtggcccctgtggctctgctgggcactctgggtgctgcccctggctggccccggggcggccctgaccgaggagcagctcctgggcagcctgctgcggcagctgcagctcagcgaggtgcccgtactggacagggccgacatggagaagctggtcatccccgcccacgtgagggcccagtatgtagtcctgctgcggcgcagccacggggaccgctcccgcggaaagaggttcagccagagcttccgagaggtggccggcaggttcctggcgtcggaggccagcacacacctgctggtgttcggcatggagcagcggctgccgcccaacagcgagctggtgcaggccgtgctgcggctcttccaggagccggtccccaaggccgcgctgcacaggcacgggcggctgtccccgcgcagcgcccaggcccgggtgaccgtcgagtggctgcgcgtccgcgacgacggctccaaccgcacctccctcatcgactccaggctggtgtccgtccacgagagcggctggaaggccttcgacgtgaccgaggccgtgaacttctggcagcagctgagccggccccggcagccgctgctgctacaggtgtcggtgcagagggagcatctgggcccgctggcgtccggcgcccacaagctggtccgctttgcctcgcagggggcgccagccgggcttggggagccccagctggagctgcacaccctggacctcagggactatggagctcagggcgactgtgaccctgaagcaccaatgaccgagggcacccgctgctgccgccaggagatgtacattgacctgcaggggatgaagtgggccaagaactgggtgctggagcccccgggcttcctggcttacgagtgtgtgggcacctgccagcagcccccggaggccctggccttcaattggccatttctggggccgcgacagtgtatcgcctcggagactgcctcgctgcccatgatcgtcagcatcaaggagggaggcaggaccaggccccaggtggtcagcctgcccaacatgagggtgcagaagtgcagctgtgcctcggatggggcgctcgtgccaaggaggctccagccataggcgcctggtgtatccattgagccctctaactgaacgtgtgcatagaggtggtcttaatgtaggtcttaactttatacttagcaagttactccatcccaatttagtgctcctgtgtgaccttcgccctgtgtccttccatttcctgtctttcccgtccatcacccatcctaagcacttacgtgagtaaataatgcagctcagatgctgagctctagtaggaaatgctggcatgctgattacaagatacagctgagcaatgcacacattttcagctgggagtttctgttctctggcaaattcttcactgagtctggaacaataataccctatgattagaactggggaaacagaactgaattgctgtgttatatgaggaattaaaaccttcaaatctctatttcccccaaatactgacccattctggacttttgtaaacatacctaggcccctgttcccctgagagggtgctaagaggaaggatgaagggcttcaggctgggggcagtggacagggaattgggatacctggattctggttctgacagggccacaagctaggatctctaacaaacgcagaaggctttggctcgtcatttcctcttaaaaaggaggagctgggcttcagctctaagaacttcattgccctggggatcagacagcccctacctacccctgcccactcctctggagactgagccttgcccgtgcatatttaggtcatttcccacactgtcttagagaacttgtcaccagaaaccacatgtatttgcatgttttttgttaatttagctaaagcaattgaatgtagatactcagaagaaataaaaaatgatgtttcaaaaaaaaaaaaaaaaaaaaaaaaaaaaaaaaaaaaaaaaaaaaaaaaaaaaaaaaaaaaaaaaaaaaaaaaaaaaaaaaaaaa

SEQ ID NO: 190 - protein, 366 aa, Homo sapiens
MWPLWLCWALWVLPLAGPGAALTEEQLLGSLLRQLQLSEVPVLDRADMEKLVIPAHVRAQYVVLLRRSHGDRSRGKRFSQSFREVAGRFLASEASTHLLVFGMEQRLPPNSELVQAVLRLFQEPVPKAALHRHGRLSPRSAQARVTVEWLRVRDDGSNRTSLIDSRLVSVHESGWKAFDVTEAVNFWQQLSRPRQPLLLQVSVQREHLGPLASGAHKLVRFASQGAPAGLGEPQLELHTLDLRDYGAQGDCDPEAPMTEGTRCCRQEMYIDLQGMKWAKNWVLEPPGFLAYECVGTCQQPPEALAFNWPFLGPRQCIASETASLPMIVSIKEGGRTRPQVVSLPNMRVQKCSCASDGALVPRRLQP

SEQ ID NO: 191 - DNA, 1398 bp, Homo sapiens
  CDS (233)..(1204)
agcggaggggcgccctaacgaacccgggatacggtctgttcctagtccgctccggaaatgcaactgcgtacgggctggccgcgtaatcgtgacgacagcgcgccagcgccggctagccggacgccctaggcttccgcgagatcttcggtgggggtacgggtgttttacgccaggacgctgatgcgtttgggttctcgtctgcagaccctctggacctggtcacgattccataatgtaccacaacagtagtcagaagcggcactggaccttctccagcgaggagcagctggcaagactgcgggctgacgccaaccgcaaattcagatgcaaagccgtggccaacgggaaggttcttccgaatgatccagtctttcttgagcctcatgaagaaatgacactctgcaaatactatgagaaaaggttattggaattctgttcggtgtttaagccagcaatgccaagatctgttgtgggtacggcttgtatgtatttcaaacgtttttatcttaataactcagtaatggaatatcaccccaggataataatgctcacttgtgcatttttggcctgcaaagtagatgaattcaatgtatctagtcctcagtttgttggaaacctccgggagagtcctcttggacaggagaaggcacttgaacagatactggaatatgaactacttcttatacagcaacttaatttccaccttattgtccacaatccttacagaccatttgagggcttcctcatcgacttaaagacccgctatcccatattggagaatccagagattttgaggaaaacagctgatgactttcttaatagaattgcattgacggatgcttaccttttatacacaccttcccaaattgccctgactgccattttatctagtgcctccagggctggaattactatggaaagttatttatcagagagtctgatgctgaaagagaacagaacttgcctgtcacagttactagatataatgaaaagcatgagaaacttagtaaagaagtatgaaccacccagatctgaagaagttgctgttctgaaacagaagttggagcgatgtcattctgctgagcttgcacttaacgtaatcacgaagaagaggaaaggctatgaagatgatgattacgtctcaaagaaatccaaacatgaggaggaagaatggactgatgacgacctggtagaatctctctaaccatttgaagttgatttctcaatgctaactaatcaagagaagtaggaagcatatcaaacgtttaactttatttaaaaagtataatgtgaaaacataaaatatattaaaacttttctattgttttctttccctttcacagtaactttatgtaaaataaaccatcttcaaaagagctagaataaaaaaaaaaaaaa

SEQ ID NO: 192 - protein, 323 aa, Homo sapiens
MYHNSSQKRHWTFSSEEQLARLRADANRKFRCKAVANGKVLPNDPVFLEPHEEMTLCKYYEKRLLEFCSVFKPAMPRSVVGTACMYFKRFYLNNSVMEYHPRIIMLTCAFLACKVDEFNVSSPQFVGNLRESPLGQEKALEQILEYELLLIQQLNFHLIVHNPYRPFEGFLIDLKTRYPILENPEILRKTADDFLNRIALTDAYLLYTPSQIALTAILSSASRAGITMESYLSESLMLKENRTCLSQLLDIMKSMRNLVKKYEPPRSEEVAVLKQKLERCHSAELALNVITKKRKGYEDDDYVSKKSKHEEEEWTDDDLVESL

SEQ ID NO: 193 - DNA, 1511 bp, Homo sapiens
  CDS (1)..(1281)
atggggactgagactgtgcctcagccttcctgggaagccatcaaccacatgtggcatgaccactactacagaggacatgactcctacctggccatcctgctccccaaccccttctacccggatccctgggctgtgccgagatcctggacagtgcctgtgggtacagaggactgtggccacaccaaagagatatgcaacgggcagctcaagctagagccctgggccggtgtctccctggcatcagtgcccctgccggtaatggagggcctcgtggtgggctgtgtcctcaccatctgtgctgtgctgggcctgctgtgctggaggcgggtgaaggggcagagggcagggaagaatccattttcccaagagctgacagcttacaacctgcgcttcaggcagagctatgaggccaagagtgctcacgcacaccaggctttctttttgcaattcgaggagctgaaggaggtgggcaaggagcagcccagactggaggctgagtacgctgccaacaccaccaagaaccattacccacatgtgcttccctacgaccactccagggtcaggctgacccagctggagggagagcctcattctgactacatcaatgccaacttcatcccagtgctgtgtgagcattactggctgaccgactctaccccggtcacccatgatcacatcaccatccacctcctagccgaggaggctgacgatgagtggaccaagcgggaattccagctgcagcacatgcgtgccccaaggatgaggggtgtgggcatgggccagacgggcaccttcgtggccctgttgaggctgctgcagcagctggaggaggagcagatggtagatgtgttccatgctgtgtttgcattctggatgcacgggcccctcatgatccagaccctgggctacaagagggaccaggaaagagagctcatggggcatacagaagaccctggggagagggtttcaaacacaacaccatcctatctgggctgtgctccctattctgtgaaaggggaggtgggacaggaccctgtcagctttgacaccatagagcggtggagggaaggtttctcagtggctccctctcccctcctacccgatccctgccttgctggtcagggcctggaaaatctccctgcaggcccccctcgctcctcgctcctcgctcctcgctcctcgctgagcagcctgatgcccttccccctggcagagccagtacgtcttcctgcacagctgcctactgaacaagattctggaagggcccttcaacatctctgagtcttggcccatctctgtgatgaacttcgcacaggcgtgtgccaagagggcagccaatgccaacgctggcttcttgaaggagtacgagctcttgctgcaggccatcaaggacgaggctggctcttacgcacccctgcctggctatgagcaggacagccccatctcctggtgggccctctggctgtgatcatatggtgctgactggcctcgcagggccagaggagctctgg

SEQ ID NO: 194 - protein, 426 aa, Homo sapiens
MGTETVPQPSWEAINHMWHDHYYRGHDSYLAILLPNPFYPDPWAVPRSWTVPVGTEDCGHTKEICNGQLKLEPWAGVSLASVPLPVMEGLVVGCVLTICAVLGLLCWRRVKGQRAGKNPFSQELTAYNLRFRQSYEAKSAHAHQAFFLQFEELKEVGKEQPRLEAEYAANTTKNHYPHVLPYDHSRVRLTQLEGEPHSDYINANFIPVLCEHYWLTDSTPVTHDHITIHLLAEEADDEWTKREFQLQHMRAPRMRGVGMGQTGTFVALLRLLQQLEEEQMVDVFHAVFAFWMHGPLMIQTLGYKRDQERELMGHTEDPGERVSNTTPSYLGCAPYSVKGEVGQDPVSFDTIERWREGFSVAPSPLLPDPCLAGQGLENLPAGPPRSSLLAPRSSLSSLMPFPLAEPVRLPAQLPTEQDSGRALQHL

SEQ ID NO: 195 - DNA, 1776 bp, Homo sapiens
  CDS (74)..(1459)
gctgtcatggcggcaggacggcgaacttgcagtatctccacgacccgcccctacaggtgccagtgcctccagaatgtggcagctcacaagcctcctgctgttcgtggccacctggggaatttccggcacaccagctcctcttgactcagtgttctccagcagcgagcgtgcccaccaggtgctgcggatccgcaaacgtgccaactccttcctggaggagctccgtcacagcagcctggagcgggagtgcatagaggagatctgtgacttcgaggaggccaaggaaattttccaaaatgtggatgacacactggccttctggtccaagcacgtcgacggtgaccagtgcttggtcttgcccttggagcacccgtgcgccagcctgtgctgcgggcacggcacgtgcatcgacggcatcggcagcttcagctgcgactgccgcagcggctgggagggccgcttctgccagcgcgaggtgagcttcctcaattgctcgctggacaacggcggctgcacgcattactgcctagaggaggtgggctggcggcgctgtagctgtgcgcctggctacaagctgggggacgacctcctgcagtgtcaccccgcagtgaagttcccttgtgggaggccctggaagcggatggagaagaagcgcagtcacctgaaacgagacacagaagaccaagaagaccaagtagatccgcggctcattgatgggaagatgaccaggcggggagacagcccctggcaggtggtcctgctggactcaaagaagaagctggcctgcggggcagtgctcatccacccctcctgggtgctgacagcggcccactgcatggatgagtccaagaagctccttgtcaggcttggagagtatgacctgcggcgctgggagaagtgggagctggacctggacatcaaggaggtcttcgtccaccccaactacagcaagagcaccaccgacaatgacatcgcactgctgcacctggcccagcccgccaccctctcgcagaccatagtgcccatctgcctcccggacagcggccttgcagagcgcgagctcaatcaggccggccaggagaccctcgtgacgggctggggctaccacagcagccgagagaaggaggccaagagaaaccgcaccttcgtcctcaacttcatcaagattcccgtggtcccgcacaatgagtgcagcgaggtcatgagcaacatggtgtctgagaacatgctgtgtgcgggcatcctcggggaccggcaggatgcctgcgagggcgacagtggggggcccatggtcgcctccttccacggcacctggttcctggtgggcctggtgagctggggtgagggctgtgggctccttcacaactacggcgtttacaccaaagtcagccgctacctcgactggatccatgggcacatcagagacaaggaagccccccagaagagctgggcaccttagcgaccctccctgcagggctgggcttttgcatggcaatggatgggacattaaagggacatgtaacaagcacaccggcctgctgttctgtccttccatccctcttttgggctcttctggagggaagtaacatttactgagcacctgttgtatgtcacatgccttatgaatagaatcttaactcctagagcaactctgtggggtggggaggagcagatccaagttttgcggggtctaaagctgtgtgtgttgagggggatactctgtttatgaaaaagaataaaaaacacaaccacgaaaaaaaaaaaaaaaaaaaaaaa

SEQ ID NO: 196 - protein, 461 aa, Homo sapiens
MWQLTSLLLFVATWGISGTPAPLDSVFSSSERAHQVLRIRKRANSFLEELRHSSLERECIEEICDFEEAKEIFQNVDDTLAFWSKHVDGDQCLVLPLEHPCASLCCGHGTCIDGIGSFSCDCRSGWEGRFCQREVSFLNCSLDNGGCTHYCLEEVGWRRCSCAPGYKLGDDLLQCHPAVKFPCGRPWKRMEKKRSHLKRDTEDQEDQVDPRLIDGKMTRRGDSPWQVVLLDSKKKLACGAVLIHPSWVLTAAHCMDESKKLLVRLGEYDLRRWEKWELDLDIKEVFVHPNYSKSTTDNDIALLHLAQPATLSQTIVPICLPDSGLAERELNQAGQETLVTGWGYHSSREKEAKRNRTFVLNFIKIPVVPHNECSEVMSNMVSENMLCAGILGDRQDACEGDSGGPMVASFHGTWFLVGLVSWGEGCGLLHNYGVYTKVSRYLDWIHGHIRDKEAPQKSWAP

SEQ ID NO: 197 - DNA, 3918 bp, Homo sapiens
  CDS (319)..(1842)
ctctcccttctccactctctccccctgtctcctttcttcttcttctttcaccctccgtctctcacaccccctccattcccctgtctcctttctgacactgcactgcagctgctcctcagccctgccccctccccagtgagaacaaaccagcaacattgctttttttcctaaagagatttatattgatccgattaaaaaaaaaaaaccttaagaaaccccaaacgcaaaaaaaaaaaaaaaaaaaaaagaaaaaagaaaagaaaaagccaaaacaaaagggagaaccttctcccggtagcagcggcaggaactgcaaacatgatggcggcagctcccatccagcagaacgggacccacactggggttcccatagacctggacccgccggactcgcggaaaaggccgctggaagccccccctgaagccggcagcaccaagaggaccaatacgggcgaagacggccagtattttctaaaggttctcatacctagttatgctgctggatctataattgggaagggaggacagacaattgttcagttgcaaaaagaaactggagccaccatcaagctgtctaagtccaaagatttttacccaggtactactgagcgagtgtgcttgatccagggaacggttgaagcactgaatgcagttcatggattcattgcagaaaaaattcgagaaatgccccaaaatgtggccaagacagaaccagtcagcattctacaaccccagaccaccgttaatccagatcgcatcaaacaaacattgccatcttccccaactaccaccaagtcctctccatctgatcccatgaccacctccagagctaatcaggtaaagattatagttcccaacagcacagcaggtctgataatagggaagggaggtgctactgtgaaggctgtaatggagcagtcaggggcttgggtgcagctttcccagaaacctgatgggatcaacttgcaagagagggttgtcactgtgagtggagaacctgaacaaaaccgaaaagctgttgaacttatcatccagaagatacaagaggatccacaaagtggcagctgtctcaatatcagttatgccaatgtgacaggtccagtggcaaattccaatccaaccggatctccttatgcaaacactgctgaagtgttaccaactgctgcagcagctgcagggctattaggacatgctaaccttgctggcgttgcagcctttccagcagttttatctggcttcacaggcaatgacctggtggccatcacctctgcacttaatacattagccagctatggatataatctcaacactttaggtttaggtctcagtcaagcagcagcaacaggggctttggctgcagcagctgccagtgccaacccagcagcagcagcagccaatttattggccacctatgccagtgaagcctcagccagtggcagcacagctggtggtacggcggggacatttgcattaggtagcctggctgctgctactgctgcaaccaatggatattttggagctgcttctcccctagctgccagtgccattctaggaacagaaaagtccacagatggatccaaggatgtagttgaaatagcagtgccagaaaacttagttggtgcaatacttggcaaaggagggaaaacattagtggaataccaggagttgactggtgcaaggatacagatctccaaaaaaggagaattcgtacctggcacaaggaatcggaaggtaaccattactggaacaccagctgcaacacaggctgctcaatatttaattacacaaaggatcacatatgagcaaggagttcgggctgccaatcctcagaaagtgggttgagtgccccagttacacatcagattgttttaacccctcctttaccccattttcaagaaggatgtactgtactttgcagaagtgaagtttttctgttattaatatataattatgcaaatgaatgcgactatgttgacaatgtgtatatgtaaataatatgtgttttaccagatgtttcatagaaagaattttttcttgatctgttttgttctctatactttgcttgtgtatatttgtcagaggtgtttctagtgtaagatttaagcctgccattttaccagcattattgtagtttaatgattgaatgtagacagggatatgcgtatagttttcagtattagttctagataacactaaattaactactgttaggttgagtatggtggggtcagtgacctaaaatggagtgaggccaaagcactgtcctgtaagtcttacttcctgcttagggcacagtgaagtaggaaacaatattttgaaaataagttttaaatttaaaatgatcaaaaagcaatatagttgcataaaagcactgtaaaatatttaaaaggttaaaactgtggaaaattatattggtaagtttacagatcaataaaagcacctgttctccatctgaactagacaatggaaataatgctgcatgctggccatggcccattcttcatcatttgtaagttcaacaaaagttctcacatggagtcccacctcttcagaggtttgtacatttgtttttaagcactgaattcactactgatcccatcgcctggccagtagaacagtcattactccattaacatcctcactgtttagacacataactgtggtacagtgtattggaaattttataaacaaaagtgaaagtgccaacaaattattgatagctgataatgtttcattatctgcaactgcttgataagtatgttgcattttaagagcttataattgtgtataatttgttaacactagaaacctattagtattgtgaatgtagattttactgtgaagctatctgtgatttagctgtttgctcccatgatggagtctttgcagcatggcgctagcagccaatgcagtttctaatactcggtaatttgcatgttttgtggagcatttttatgtcaccaaccagacagtatttcctgcatgcttatttagaagaggcagcttatcttgagaggtagtgttatctacctttgtcaggctttttgacaggtcatttcagagtaagcctttgttcccaagacccaacaactgtcaccctcttctgtacctctcctgagtgccaactgtccaggccatttgacacaccatctgttaacctctgagtttgcccactcaaggccactcataggggcatccatccccaagcacctcctcatgctgtgcatgcagtcttaaattcaatggacaaaaataaaatgctggctacctctggatcatctggctgagcaactgaattacaaaagagaattacttccatctcaacttcaacccattgattacgtccatcctagcaagctaaatggcatcccagctgctcctttctgtgcaaccaattaaagaacaatgagtgtgatgctccatgtctgaatttcgtccagcctctctctgaactgtgatctttgtcctcatgaactttcccttttgttcattgaactatatggactcttcatttcatattgatttactgtgcaatttacttttggacattgagaacttgaaattatttcctgatcccttccccttccactattaataattcatttctgtcaaactgtaagagtagactcatttttttttttttagtttttaacattggactgttatttcatttagagttctctatctctaaatatttatttagagaatgattttaaaagggaatgatatgcttgtttaaatgaaagagaaaagctgtagtaaactgtgttaattggtaatgactatttatcgtcgatactctgtagctgtgtaagttttgacaaatagtgtatctcgtggaatcagtggttagcattgccgctattatatttactcattttatcattataaatgtgcttagttcatcatgtagcatca

SEQ ID NO: 198 - protein, 507 aa, Homo sapiens
MMAAAPIQQNGTHTGVPIDLDPPDSRKRPLEAPPEAGSTKRTNTGEDGQYFLKVLIPSYAAGSIIGKGGQTIVQLQKETGATIKLSKSKDFYPGTTERVCLIQGTVEALNAVHGFIAEKIREMPQNVAKTEPVSILQPQTTVNPDRIKQTLPSSPTTTKSSPSDPMTTSRANQVKIIVPNSTAGLIIGKGGATVKAVMEQSGAWVQLSQKPDGINLQERVVTVSGEPEQNRKAVELIIQKIQEDPQSGSCLNISYANVTGPVANSNPTGSPYANTAEVLPTAAAAAGLLGHANLAGVAAFPAVLSGFTGNDLVAITSALNTLASYGYNLNTLGLGLSQAAATGALAAAAASANPAAAAANLLATYASEASASGSTAGGTAGTFALGSLAAATAATNGYFGAASPLAASAILGTEKSTDGSKDVVEIAVPENLVGAILGKGGKTLVEYQELTGARIQISKKGEFVPGTRNRKVTITGTPAATQAAQYLITQRITYEQGVRAANPQKVG

SEQ ID NO: 199 - DNA, 2497 bp, Homo sapiens
  CDS (117)..(1268)
actggataagcggtcgctgagcggggcgcaggtgactaaatttcgacggggtcttctcacgggtttcattcagttggccactgctgagcagctgagaaggtggcgacgtaggggccatggggctgggccgggtcctgctgtttctggccgtcgccttcccttttgcacccccggcagccgccgctgagccccacagtcttcgttacaacctcatggtgctgtcccaggatggatctgtgcagtcagggtttctcgctgagggacatctggatggtcagcccttcctgcgctatgacaggcagaaacgcagggcaaagccccagggacagtgggcagaaaatgtcctgggagctaagacctgggacacagagaccgaggacttgacagagaatgggcaagacctcaggaggaccctgactcatatcaaggaccagaaaggaggcttgcattccctccaggagattagggtctgtgagatccatgaagacagcagcaccaggggctcccggcatttctactacgatggggagctcttcctctcccaaaacctggagactcaagaatcgacagtgccccagtcctccagagctcagaccttggctatgaacgtcacaaatttctggaaggaagatgccatgaagaccaagacacactatcgcgctatgcaggcagactgcctgcagaaactacagcgatatctgaaatccggggtggccatcaggagaacagtgccccccatggtgaatgtcacctgcagcgaggtctcagagggcaacatcaccgtgacatgcagggcttccagcttctatccccggaatatcacactgacctggcgtcaggatggggtatctttgagccacaacacccagcagtggggggatgtcctgcctgatgggaatggaacctaccagacctgggtggccaccaggattcgccaaggagaggagcagaggttcacctgctacatggaacacagcgggaatcacggcactcaccctgtgccctctgggaaggcgctggtgcttcagagtcaacggacagactttccatatgtttctgctgctatgccatgttttgttattattattattctctgtgtcccttgttgcaagaagaaaacatcagcggcagagggtccagagcttgtgagcctgcaggtcctggatcaacacccagttgggacaggagaccacagggatgcagcacagctgggatttcagcctctgatgtcagctactgggtccactggttccactgagggcacctagactctacagccaggcggccaggattcaactccctgcctggatctcaccagcactttccctctgtttcctgacctatgaaacagagaaaataacatcacttatttattgttgttggatgctgcaaagtgttagtaggtatgaggtgtttgctgctctgccacgtagagagccagcaaagggatcatgaccaactcaacattccattggaggctatatgatcaaacagcaaattgtttatcatgaatgcaggatgtgggcaaactcacgactgctcctgccaacagaaggtttgctgagggcattcactccatggtgctcattggagttatctactgggtcatctagagcctattgtttgaggaatgcagtcttacaagcctactctggacccagcagctgactccttcttccacccctcttcttgctatctcctataccaataaatacgaagggctgtggaagatcagagcccttgttcacgagaagcaagaagccccctgaccccttgttccaaatatactcttttgtctttctctttattcccacgttcgccctttgttcagtccaatacagggttgtggggcccttaacagtgccatattaattggtatcattatttctgttgtttttgtttttgtttttgtttttgtttttgagacagagtctcactctgtcacccaggctgcagttcactggtgtgatctcagctcactgcaacctctgcctcccaggttcaagcacttctcgtacctcagactcccgaatagctgggattacagacaggcaccaccacacccagctaatttttgtattttttgtagagacggggtttcgccaagttgaccagcccagtttcaaactcctgacctcaggtgatctgcctgccttggcatcccaaagtgctgggattacaagaatgagccaccgtgcctggcctattttattatattgtaatatattttattatattagccaccatgcctgtcctattttcttatgttttaatatattttaatatattacatgtgcagtaattagattatcatgggtgaactttatgagtgagtatcttggtgatgactcctcctgaccagcccaggaccagctttcttgtcaccttgaggtcccctcgccccgtcacaccgttatgcattactctgtgtctactattatgtgtgcataatttataccgtaaatgtttactctttaaatagaaaaaaaaaaaaaaa

SEQ ID NO: 200 - protein, 383 aa, Homo sapiens
MGLGRVLLFLAVAFPFAPPAAAAEPHSLRYNLMVLSQDGSVQSGFLAEGHLDGQPFLRYDRQKRRAKPQGQWAENVLGAKTWDTETEDLTENGQDLRRTLTHIKDQKGGLHSLQEIRVCEIHEDSSTRGSRHFYYDGELFLSQNLETQESTVPQSSRAQTLAMNVTNFWKEDAMKTKTHYRAMQADCLQKLQRYLKSGVAIRRTVPPMVNVTCSEVSEGNITVTCRASSFYPRNITLTWRQDGVSLSHNTQQWGDVLPDGNGTYQTWVATRIRQGEEQRFTCYMEHSGNHGTHPVPSGKALVLQSQRTDFPYVSAAMPCFVIIIILCVPCCKKKTSAAEGPELVSLQVLDQHPVGTGDHRDAAQLGFQPLMSATGSTGSTEGT

SEQ ID NO: 201 - DNA, 998 bp, Homo sapiens
  CDS (58)..(414)
gggaacggggcggagcgcggctgcgccggcgcgtcgaggggagaggcagcagccgcgatggacgtgttcctcatgatccggcgccacaagaccaccatcttcacggacgccaaggagtccagcacggtgttcgaactgaagcgcatcgtcgagggcatcctcaagcggcctcctgacgagcagcggctgtacaaggatgaccaactcttggatgatggcaagacactgggcgagtgtggcttcaccagtcaaacagcacggccacaggccccagccacagtggggctggccttccgggcagatgacacctttgaggccctgtgcatcgagccgttttccagcccgccagagctgcccgatgtgatgaagccccaggactcgggaagcagtgccaatgaacaagccgtgcagtgaggacccccaagaggcccatttcccccaataaaagagatttgggagtctgcctggttgctgcctctttttcccgcccctccctgggatgggtcccactccctgtgggctccttttggggcttgtgcttggcagttcctgtgctgtcctgtctcccagatcctgagaccctggctgagaacttggcccagcctgctgcttaaaggcaccatggggacctgggttgccctgagacccaagccattgttagcagctagccagccacaccaaccacgccagggggaggaaagggaaggactgggagagacacaaagaccagagccagcctcagggacaagagattccagttttaggcctttctccttctaagtgccccccacccccatagcctgcatgtccactcccagacgatggccaagagcagaaacacaagctggagccagtgtcctggtttgacagcatgttcaacgagggaaccccaagacggacccacacaggtccacccacgctgggggctgtaatcacggagggaagtggctgcccccttaacacacctttaataaacagtctacagacccaaaaaaaaa

SEQ ID NO: 202 - protein, 118 aa, Homo sapiens
MDVFLMIRRHKTTIFTDAKESSTVFELKRIVEGILKRPPDEQRLYKDDQLLDDGKTLGECGFTSQTARPQAPATVGLAFRADDTFEALCIEPFSSPPELPDVMKPQDSGSSANEQAVQ

SEQ ID NO: 203 - DNA, 4085 bp, Homo sapiens
  CDS (142)..(2136)
agttttctccaacatggccgcgcccaggggagatggcgtgcaagtatccgctgcggtgttctggtgctagagtggagaggctggcaaagaagaaggcacacgcatggtgagaatccggcctgagccgaagcggagtttgctatggacagcaaccatcaaagtaattacaaactcagtaaaactgagaagaagttcttaaggaaacagattaaagccaagcatactttgctgagacatgaaggcattgagacagtatcctatgccactcagagcctggttgttgccaatggtggtttgggtaatggtgtgagtcggaaccagctgctcccggttttagagaaatgtggactggtggatgctctcttaatgccacctaacaagccgtactcatttgcaagatacagaactacagaagaatctaagagagcctatgttaccctcaatggaaaagaagtagtggatgatttaggacaaaagatcactctgtatttgaattttgtggaaaaagtgcagtggaaggagttgaggcctcaagccttaccaccaggactcatggtagtagaagaaataatttcttctgaggaggagaaaatgcttttggaaagtgttgattggacagaagatacagacaatcaaaactctcaaaaatccttaaaacacagaagagtaaagcattttggttatgagttccactatgagaacaacaatgtagataaagataagccattatctgggggtcttcctgacatttgtgaaagctttttggagaaatggttgaggaaaggttacattaaacataaacctgatcaaatgaccataaatcagtatgaacctgggcaaggaattcccgctcatattgatacacattccgcttttgaggatgagatcgtttctctcagtttggggtcagagattgtcatggattttaagcacccagatggcattgcagtgccagttatgttgcctcgtcggagtttgctggtgatgacaggagaatctagatacctttggacccatggaatcacgtgcagaaaatttgatactgttcaagcatctgagagtcttaaaagtggaattatcaccagtgatgttggagacttaactttaagcaagaggggactacgaacatcatttacatttaggaaagtgaggcaaacaccttgtaactgtagttacccgttggtctgtgatagccagaggaaagagactcccccctcatttccagagagtgataaagaagcctcacggctggagcaagagtacgtccatcaggtttatgaagagattgctgggcacttcagcagcacaagacataccccttggccgcacattgtggagtttttgaaggctttgccaagtggttcaatagtggctgatattggatgtggtaatggaaagtatcttggcatcaataaggagttatatatgattggttgtgatcgtagccaaaaccttgtggacatttgtagagagaggcaatttcaggcttttgtctgtgatgcattggcagtaccagtccgcagtgggtcttgtgatgcctgcatctccattgctgttattcatcattttgcaacagcagagcgtagagtggcagctctccaagaaattgttcgactcctgagaccaggtgggaaggcactcatttatgtctgggcaatggaacaagaatataataagcagaagtccaagtatcttagaggaaacagaaatagccaaggaaagaaagaggagatgaacagtgatacctcagtgcagaggtcacttgtggagcaaatgcgtgacatgggcagtcgagactcggcatcttctgtcccccgcattaatgactctcaggaaggaggatgtaattcaaggcaagtttctaattccaagctgcctgttcatgttaacaggacttctttttattctcaagatgtactggttccctggcaccttaagggaaatcctgataaaggcaaacctgttgagccatttggtcccataggatcccaggacccaagtcctgtgtttcatcgttactaccatgtgttccgtgagggagaactggaaggtgcctgcaggactgtgagtgatgtcagaattctgcaaagctactacgatcaaggaaactggtgtgtgattcttcaaaaggcctgattatttacctgaacacatcatatataaagaagaaatgctcacttaaaaaaaaagagagaataaattaattacccttttaattaaagagaaaacttgtgggaaagtaccaaaggaaagctgagaaaaatttggaagtagggattcattaggagacattcaaatgtctcctgttggctgacatcacagatgtggtgttggctcctcctacttccctaggagaggtggtttctaaaagtgattgaagcagtttgtgcagtgtttgtaattcttgggtaagagcccaggattttgaagataatagttttttagtaaagtgctactaaatgtagtaaatcatgtaggattttagggatgtaattatatgttaatacagaaaatagtcctggtcaatagaaaattgtctgaagttttacctatgatttttagctctgtaaaatcatagacaataaccattctatttccatgcctgactagcccagggctggacgtatagcgggtgtccaataacgtttagtcaatcagataatacccagaacttagtaggagtttcattcaaaaactattttttgaacccaaccatgtaccagttactattttaagtactgataatgaagcagtgaataagaaagagcaaagctcttgcccttatggtgcttacattctagacggggagacagacagcaggcaaatcaataaatagatactatgtgccagatagtgataaatgccatgaaaaacataaaatgagagacgattcaccttggagcaaaagattacttttaagtgactgaaataactactaatcctgactaatttattatcaagagttaattggtattccaaattcattgagcagggtgctaaaaacaacccaaatgtgctcctttaactcctttgtttaaatgacaaaagttagaatgtggtcactcagacctaactgtgcccttagagccaaagctgtggtgtcattattggttatttctagttgattcatagtttgtcccaatccaggttcaatcgggttatttttaagatctgtacaatattgcataatagtaacccagttaacttaccacttaggttagatttcctggaggaacaaaggtagaaattcaaccataggtcaaattatcacatagaaggaaaaggctttttttcaaagaaaaaattttttgaacactttactcccagtatgcattacttttgtagtagtaatgcttaagactgttttaaagaaaaattgctttctgtttaattaatgtttactgttattaatgctagtgatacttaatcttgaagcatcaagttttcagaaacctatagtgatcaataatgggtctcagatgagaggatgattatttttttcatggaatttcagtccaacatcctggtgtactggtccctctgggatgaatttataaggctcatgatataggaaaaggaatatagggctaaaaatagttttatttctgatataaattctggtacttgacaccaaagtttgaagtcaagtcatgccaataaattttaacatccaaatgaaatagatgattttctatgaagatgaaaaataccaaaattgactcaagaagggagagaaaatggaagatgttgaaaaatagcataggaattcagaactgggctctagaatcagatttcctgagagttgaattctagatctgccatttattagctgtgggattttgggcaaatttcttgactttctgtgcttcagttttcttagctgtaaaattggaagagttgttatgaaaattcactgaaagtatatttgtatacatcataggatagtgtaagaatatagtatggctttgagaaatgttcattattattactcccagaggagttttaggtattaagtgatgccaaatataatttgttaattgtataataaaaatctatattcttactgaaaaaaaaaaaaaaaaaaa

SEQ ID NO: 204 - protein, 664 aa, Homo sapiens
MDSNHQSNYKLSKTEKKFLRKQIKAKHTLLRHEGIETVSYATQSLVVANGGLGNGVSRNQLLPVLEKCGLVDALLMPPNKPYSFARYRTTEESKRAYVTLNGKEVVDDLGQKITLYLNFVEKVQWKELRPQALPPGLMVVEEIISSEEEKMLLESVDWTEDTDNQNSQKSLKHRRVKHFGYEFHYENNNVDKDKPLSGGLPDICESFLEKWLRKGYIKHKPDQMTINQYEPGQGIPAHIDTHSAFEDEIVSLSLGSEIVMDFKHPDGIAVPVMLPRRSLLVMTGESRYLWTHGITCRKFDTVQASESLKSGIITSDVGDLTLSKRGLRTSFTFRKVRQTPCNCSYPLVCDSQRKETPPSFPESDKEASRLEQEYVHQVYEEIAGHFSSTRHTPWPHIVEFLKALPSGSIVADIGCGNGKYLGINKELYMIGCDRSQNLVDICRERQFQAFVCDALAVPVRSGSCDACISIAVIHHFATAERRVAALQEIVRLLRPGGKALIYVWAMEQEYNKQKSKYLRGNRNSQGKKEEMNSDTSVQRSLVEQMRDMGSRDSASSVPRINDSQEGGCNSRQVSNSKLPVHVNRTSFYSQDVLVPWHLKGNPDKGKPVEPFGPIGSQDPSPVFHRYYHVFREGELEGACRTVSDVRILQSYYDQGNWCVILQKA

SEQ ID NO: 205 - DNA, 2828 bp, Homo sapiens
  CDS (219)..(2051)
cgcacgcgcggttagtagtcgctgctgcgcggccgccggcgggactggtctgaagagacgcggggaccaagtggcaacgacttggacatctgagctgtcactgccgaaaacaggccgcaagagagcatctgcccaagcaacaaagaggaggtgtttgcttgggagttaaaagcaaatggcaaccaaagctcaggactgggagagaaaagataatcaatatgcatttccaagccttttggctatgtttgggtcttctgttcatctcaattaatgcagaatttatggatgatgatgttgagacggaagactttgaagaaaattcagaagaaattgatgttaatgaaagtgaactttcctcagagattaaatataagacacctcaacctataggagaagtatattttgcagaaacttttgatagtggaaggttggctggatgggtcttatcaaaagcaaagaaagatgacatggatgaggaaatttcaatatacgatggaagatgggaaattgaagagttgaaagaaaaccaggtacctggtgacagaggactggtattaaaatctagagcaaagcatcatgcaatatctgctgtattagcaaaaccattcatttttgctgataaacccttgatagttcaatatgaagtaaattttcaagatggtattgattgtggaggtgcatacattaaactcctagcagacactgatgatttgattctggaaaacttttatgataaaacatcctatatcattatgtttggaccagataaatgtggagaagattataaacttcattttatcttcagacataaacatcccaaaactggagttttcgaagagaaacatgccaaacctccagatgtagaccttaaaaagttctttacagacaggaagactcatctttatacccttgtgatgaatccagatgacacatttgaggtgttagttgatcaaacagttgtaaacaaaggaagcctcctagaggatgtggttcctcctatcaaacctcccaaagaaattgaagatcccaatgataaaaaacctgaggaatgggatgaaagagcaaaaattcctgatccttctgccgtcaaaccagaagactgggatgaaagtgaacctgcccaaatagaagattcaagtgttgttaaacctgctggctggcttgatgatgaaccaaaatttatccctgatcctaatgctgaaaaacctgatgactggaatgaagacacggatggagaatgggaggcacctcagattcttaatccagcatgtcggattgggtgtggtgagtggaaacctcccatgatagataacccaaaatacaaaggagtatggagacctccactggtcgataatcctaactatcagggaatctggagtcctcgaaaaattcctaatccagattatttcgaagatgatcatccatttcttctgacttctttcagtgctcttggtttagagctttggtctatgacctctgatatctactttgataattttattatctgttcggaaaaggaagtagcagatcactgggctgcagatggttggagatggaaaataatgatagcaaatgctaataagcctggtgtattaaaacagttaatggcagctgctgaagggcacccatggctttggttgatttatcttgtgacagcaggagtgccaatagcattaattacttcattttgttggccaagaaaagtaaagaaaaaacataaagatacagagtataaaaaaaccgacatatgtataccacaaacaaaaggagtactagagcaagaagaaaaggaagagaaagcagccctggaaaaaccaatggacctggaagaggaaaaaaagcaaaatgatggtgaaatgcttgaaaaagaagaggaaagtgaacctgaggaaaagagtgaagaagaaattgaaatcatagaagggcaagaagaaagtaatcaatcaaataagtctgggtcagaggatgagatgaaagaagcagatgagagcacaggatctggagatgggccgataaagtcagtacgcaaaagaagagtacgaaaggactaaactagattgaaatatttttaattcccgagagggatgtttggcattgtaaaaatcagcatgccagacctgaactttaatcagtctgcacatcctgtttctaatatctagcaacattatattctttcagacatttattttagtccttcatttcagaggaaaaagaagcaactttgaagttacctcatctttgaatttagaataaaagtggcacattacatatcggatctaagagattaataccattagaagttacacagttttagttgtttggagatagttttggtttgtacagaacaaaataatatgtagcagcttcattgctattggaaaaatcagttattggaatttccacttaaatggctatacaacaatataactggtagttctataataaaaatgagcatatgttctgttgtgaagagctaaatgcaataaagtttctgtatggttgtttgattctatcaacaattgaaagtgttgtatatgacccacatttacctagtttgtgtcaaattatagttacagtgagttgtttgcttaaattatagattcctttaaggacatgccttgttcataaaatcactggattatattgcagcatattttacatttgaatacaaggataatgggttttatcaaaacaaaatgatgtacagattttttttcaagtttttatagttgctttatgccagagtggtttaccccattcacaaaatttcttatgcatacattgctattgaaaataaaatttaaatattttttcatcctgaaaaaaaa

SEQ ID NO: 206 - protein, 610 aa, Homo sapiens
MHFQAFWLCLGLLFISINAEFMDDDVETEDFEENSEEIDVNESELSSEIKYKTPQPIGEVYFAETFDSGRLAGWVLSKAKKDDMDEEISIYDGRWEIEELKENQVPGDRGLVLKSRAKHHAISAVLAKPFIFADKPLIVQYEVNFQDGIDCGGAYIKLLADTDDLILENFYDKTSYIIMFGPDKCGEDYKLHFIFRHKHPKTGVFEEKHAKPPDVDLKKFFTDRKTHLYTLVMNPDDTFEVLVDQTVVNKGSLLEDVVPPIKPPKEIEDPNDKKPEEWDERAKIPDPSAVKPEDWDESEPAQIEDSSVVKPAGWLDDEPKFIPDPNAEKPDDWNEDTDGEWEAPQILNPACRIGCGEWKPPMIDNPKYKGVWRPPLVDNPNYQGIWSPRKIPNPDYFEDDHPFLLTSFSALGLELWSMTSDIYFDNFIICSEKEVADHWAADGWRWKIMIANANKPGVLKQLMAAAEGHPWLWLIYLVTAGVPIALITSFCWPRKVKKKHKDTEYKKTDICIPQTKGVLEQEEKEEKAALEKPMDLEEEKKQNDGEMLEKEEESEPEEKSEEEIEIIEGQEESNQSNKSGSEDEMKEADESTGSGDGPIKSVRKRRVRKD

SEQ ID NO: 207 - DNA, 3049 bp, Homo sapiens
  CDS (155)..(1147)
gggccccgcggcccgccatataaacccgcgcgcccgccaggcgctgcggccgtcccgggccgtgactcctcctttcccccgccccgcctccgttcggagagccggcgggcgggcgcctctcggccaggaagcgcctcttggacgcgtgtgaccgatgcccagattgcacgaccacttctggagctgctcctgtgcgcacagcgcgaggcgccgaggccccccgcgagccagcgccgcggggctggcggccaaggttggggagatgatcaacgtttccgtgtccgggccctccctgctggcggcccacggtgccccggacgctgaccccgcgcccaggggccgcagtgctgcgatgagcggccccgagcccggcagcccctaccccaacacctggcatcatcgcctgttgcagaggagcctcgtgctcttctcggttggggtggtcctagccctggtgctcaacctgctgcagatccagaggaatgtcactctcttccccgaggaggtgatcgccaccatcttttcctccgcctggtgggtccctccctgctgcgggacagcagctgctgttgttggcctactgtacccctgtatcgacagtcacctcggagaaccccacaaatttaagagagaatgggccagtgtcatgcgctgcatagcagtttttgttggcattaaccacgccagtgctaaattggattttgccaataatgtccagctgtccttgactttagcagccctatctttgggcctttggtggacatttgatcgttccagaagtggccttgggctggggatcaccatagcttttctagctacgctgatcacgcagtttctcgtgtataatggtgtctatcagtatacatccccagatttcctctatattcgttcttggctcccttgtatatttttctcaggaggcgtcacggtggggaacataggacgacagttagctatgctgatacccttctgtgaggagttgaatttgaagaccacttggctgtttcacaaaaccagaagtaattacagggtgttcctgaaaagccccatagtgattgagtcttcaaaaccaccgattctgagagcaaggaagattttggaagaaaatctgactgtggattatgacaaagattatcttttttcttaagtaatctatttagatcgggctgactgtacaaatgactcctggaaaaaactcttcacctagtctagaatagggaggtggagaatgatgacttaccctgaagtcttcccttgactgcccgcactggcgcctgtctgtgccctggagcattctgcccaggctacgtgggttcaggcaggtggcagcttcccaagtattcgatttcattcatgtgattaaaacaagttgccatatttcaaagccttgaactaagactcaattaccaacccgcagttttgtgtcagtgcccaaaggaggtaggttgatggtgcttaacaaacatgaagtatggtgtaataggaataatatttatccaaaagatttttaaaaatagggctgtgtttaaaaaaaaaaaacaaaacaagaaaagcagcagtgattatagagaggtcacactctaagtggggtcgcggcgtggccacgcttcacggtcacgctcgtccgtcctgcagtggcgtgtttacatggtcacacgtgtgtgtatcaccagtgggtcaactgcttgtcattcctcccgtggcagtttgtgtagacaatcttactgagcaaaaggcaatgaaaagtcttggttcccacactgcgatatattggaattttcacctcagtttatgaagtttatttcgaaatccatagtcatctaagaatgaatacctgtctgccatgtatttcaatcttagtgagccaaaattgtttgtttgttactacagaatagagatgactgttttttgccacagccctatggaatttgcaatctgtgattgccttgtaaaaaggagagtgcatatggcactgcattaaacgtgtggtgtttctagtcaatgatattggtgagcacaatgtattcatttaatggcatagaccataccagacctaatttgcaagtattgggtcttaaacttcaagtgcaatgtatatgaaaaccaatctgagccttgtatctcttaaatatttattttttttaacgtgtgagatgttcgagagaaggttctccattcatttcagtgctgcctggaggaaactcggcaatgatttctttcagttgtgaagttcctttcgtgttacaccctccactgaaccctcaaccttcgaaatactccagttttgtgggtttggtcatttttacttataaatttacctttttgtattttgcaatttacatgtgtttggtttgttttaaattctgtgaaagtggcttgattaaaagactccttttaaatggaagccaccagtcagcagaatggaagcttagaggaacttgcctgtgagcgctggtctttgtgtttggttttgtgatgtaacgatctttgctggggttttttgctttgttttgagggaaatgtcttggagtaaattttaagttcctggagttaatttgttttacaggaattttgttttttaaaaaaataggatcattctgaactttggaatgacccccttatatattttctgaaaatgaaaacagttacatgaaaaaaatttccaatgaagatgtcagcattttatgaaaaaccagaagttattagatgaaagcagcgagtgaatctttaaaacagacttgatcacgcacacacaataagtctttctctccgaaaccggaagtaaatctatatctgttagaaataatgtagccaaaagaatgtaaatttgaggatttttttgccaatagtttatagaaaatatatgaaccaaagtgatttgagtttgtaaaaatgtaaaatagtatgaacaaaatttgcactctaccagatttgaacatctagtgaggttcacattcatactaagttttcaacattgtgttctttttgcattcattttttacttttattaaaggttcaaaaccaaaaaaaaaaaaaaaaaaaaaaaaaa

SEQ ID NO: 208 - protein, 330 aa, Homo sapiens
MPRLHDHFWSCSCAHSARRRGPPRASAAGLAAKVGEMINVSVSGPSLLAAHGAPDADPAPRGRSAAMSGPEPGSPYPNTWHHRLLQRSLVLFSVGVVLALVLNLLQIQRNVTLFPEEVIATIFSSAWWVPPCCGTAAAVVGLLYPCIDSHLGEPHKFKREWASVMRCIAVFVGINHASAKLDFANNVQLSLTLAALSLGLWWTFDRSRSGLGLGITIAFLATLITQFLVYNGVYQYTSPDFLYIRSWLPCIFFSGGVTVGNIGRQLAMLIPFCEELNLKTTWLFHKTRSNYRVFLKSPIVIESSKPPILRARKILEENLTVDYDKDYLFS

SEQ ID NO: 209 - DNA, 2344 bp, Homo sapiens
  CDS (381)..(1856)
cgcgggccaccccgctctcctcgccgccgcggcggcaggcgcggggccgcgccgcgaggcctgatccctgcagcgcgggcaggcggcgtcgcagagcggagctagctggatgcgtccggactcctgcaggtgagagtgattttccagtgattgctttggcctgtacaaccagagaacaggattcttcccttctttttggccaccaaatgcctatgtgcaccacacattccagtgtgctgagaagggcagagcttcttggatgatgatggacgtcccaccgggcaggatgaaggcagagcgtgtggcatctccacctcaagggtgcagcctgatcttcctcttctcccttgccagccagcactctgccttctgtatccaccatggtgtttggtgagtttttccatcgccctggacaagacgaggaacttgtcaacctgaatgtggggggctttaagcagtctgttgaccaaagcaccctcctgcggtttcctcacaccagactggggaagctgcttacttgccattctgaagaggccattctggagctgtgtgatgattacagtgtggccgataaggaatactactttgatcggaatccctccttgttcagatatgttttgaatttttattacacggggaagctgcatgtcatggaggagctgtgcgtattctcattctgccaggagatcgagtactggggcatcaacgagctcttcattgattcttgctgcagcaatcgctaccaggaacgcaaggaggaaaaccacgagaaggactgggaccagaaaagccatgatgtgagtaccgactcctcgtttgaagagtcgtctctgtttgagaaagagctggagaagtttgacacactgcgatttggtcagctccggaagaaaatctggattagaatggagaatccagcgtactgcctgtccgctaagcttatcgctatctcctccttgagcgtggtgctggcctccatcgtggccatgtgcgttcacagcatgtcggagttccagaatgaggatggagaagtggatgatccggtgctggaaggagtggagatcgcgtgcattgcctggttcaccggggagcttgccgtccggctggctgccgctccttgtcaaaagaaattctggaaaaaccctctgaacatcattgactttgtctctattattcccttctatgccacgttggctgtagacaccaaggaggaagagagtgaggatattgagaacatgggcaaggtggtccagatcctacggcttatgaggattttccgaattctaaagcttgcccggcactcggtaggacttcggtctctaggtgccacactgagacacagctaccatgaagttgggcttctgcttctcttcctctctgtgggcatttccattttctctgtgcttatctactccgtggagaaagatgaccacacatccagcctcaccagcatccccatctgctggtggtgggccaccatcagcatgacaactgtgggctatggagacacccacccggtcaccttggcgggaaagctcatcgccagcacatgcatcatctgtggcatcttggtggtggcccttcccatcaccatcatcttcaacaagttttccaagtactaccagaagcaaaaggacattgatgtggaccagtgcagtgaggatgcaccagagaagtgtcatgagctaccttactttaacattagggatatatatgcacagcggatgcacaccttcattaccagtctctcttctgtaggcattgtggtgagcgatcctgactccacagatgcttcaagcattgaagacaatgaggacatttgtaacaccacctccttggagaattgcacagcaaaatgagcgggggtgtttgtgcctgtttctcttatcctttcccgacattaggttaacacagctttataaacctcagtgggttcgttaaaatcatttaattctcagggtgtacctttcagccatagttggacattcattgctgaattctgaaatgatagaattgtctttatttttctctgtgaggtcaattaaatgccttgttctgaaatttattttttacaagagagagttgtgatatagtttggaatataagataaatggtattgggtggggtttgtggctacagcttatgcatcattctgtgtttgtcatttactcacattgagctaactttaaattactgacaagtagaatcaaaggtgcagctgactgagacgacatgcatgtaagatccacaaaatgagacaatgcatgtaaatccatgctcatgttctaaacatggaaactaggagcctaataaacttcctaattcagtatggaaaaaaaaaaaaaaa

SEQ ID NO: 210 - protein, 491 aa, Homo sapiens
MVFGEFFHRPGQDEELVNLNVGGFKQSVDQSTLLRFPHTRLGKLLTCHSEEAILELCDDYSVADKEYYFDRNPSLFRYVLNFYYTGKLHVMEELCVFSFCQEIEYWGINELFIDSCCSNRYQERKEENHEKDWDQKSHDVSTDSSFEESSLFEKELEKFDTLRFGQLRKKIWIRMENPAYCLSAKLIAISSLSVVLASIVAMCVHSMSEFQNEDGEVDDPVLEGVEIACIAWFTGELAVRLAAAPCQKKFWKNPLNIIDFVSIIPFYATLAVDTKEEESEDIENMGKVVQILRLMRIFRILKLARHSVGLRSLGATLRHSYHEVGLLLLFLSVGISIFSVLIYSVEKDDHTSSLTSIPICWWWATISMTTVGYGDTHPVTLAGKLIASTCIICGILVVALPITIIFNKFSKYYQKQKDIDVDQCSEDAPEKCHELPYFNIRDIYAQRMHTFITSLSSVGIVVSDPDSTDASSIEDNEDICNTTSLENCTAK

SEQ ID NO: 211 - DNA, 7531 bp, Homo sapiens
  CDS (298)..(660)
gaccagcttccccaactccctctggctcccgccttcgcccgcttccggtcgtcgtcgtcgccgctgctgccgctgctgttgctcctgaggctgctggctgaggccggaggatcgagcggcggcggcggcggcggctgagagggcggcggcgggagcggagcgggacgagggaacgggaggaagcgagcgaggagcgcgcagagcgcgcttttccgtccgcctgaggagccgaagcagccccggccccgccgccgccgcctgcccgccggacaaagccgagagcccgcgcccacagccatgtcctcgtcagccggcagcggccaccagcccagccagagccgcgccatccccacccgcaccgtggccatcagcgacgccgcgcagctacctcatgactattgcaccacgcccggggggacgctcttctccaccacaccgggaggaactcgaatcatttatgacagaaagtttctgttggatcgtcgcaattctcccatggctcagaccccaccctgccacctgcccaatatcccaggagtcactagccctggcaccttaattgaagactccaaagtagaagtaaacaatttgaacaacttgaacaatcacgacaggaaacatgcagttggggatgatgctcagttcgagatggacatctgactctcctgcaaggattagaagaaaagcagcaacactgatacttgtgtgcacctgatttggccaataggatcaacagtgaaaagacagaagaggcaataccagcagtccccattacagtctccacctccccgtcttcctctgggtgccaaatgatgggaagatgagcttcatctgaccatttcttctccctgtctcctgttccccttcccagttaaacaggttagattgaaggcccttgctgtatttctgtagagctaagcagcccttagaggaaaacagttcaactctgactttcctagttgtttttttattgagagccaccctcataccctgtaattttgtcccaaatcaaatatcaacctaccaacaactgcctggctgggaagtctggggaagggatacagagcttggtgggcctaacaccattcatattccttaccctctgtctctcctccctgtatcccacctatggttcagtgttgcaagagtctgggcttggggtctttaaaaccagcagggggaaatgataaaaagagagctgctttcccttttaccttgaggtattcgtccctcgggacagagcacagcttgtgcaactctggtagcgttaccctgtgacactgttttgaggtccacttcctttctttcctctgggaggaatgtcttctgtctttggtattatagttcatcttcccattcttttacttagtgcatttgtgcagatatttttaactctgtacatcagaagagagcccttggtaaccagttttgctcttcttctgccactcctccctgcttgcatctcgttgctggcagagtcctcttgtacttcaagaaagcaaagtgattttgtctgctcctagagcaggtccataccaagtaatagaggcactttagcttccacttggtgggtaaggcctgatcatagtattctgtcagataatgcctaagaatgaccgctgaagaacgttgacccatttgagtacccggtctcagtcgtcatttttaagtccagtgagcattgtggtagttgttcttagattgcagtttcttatgttttgagtttgaagttgattttcagaatgttcttagaaaagaactgcatttttttcctttgtggatctgctttgtttggctgctgggatagataagcatgggcttaaaaaatgtgttcctcccagttttcttgcctttcctgttgtactctgaatttctctccctacctccctcactttcttcctctctccttcctttccttcctttttctctaccaggccatttttcaaatttacatcaaagatacctgaagtgttggtatctgagaatatctgtcactcctcttatctgagaagtgaccttttatttttaagatgactacagacctatttttagatatgttttcagtacaattttgaacagcaactttttaattaaacatcttccagtgttaggaagttgagaaacgttcataggcaagtctgctgttctatgtcaccatcttttgtctcccctagtcccccaggagctctttcctttcccctctagttttgggtgtgcatgtttggagtttgtagtgggtggtttgtaaaactggaccattctgccttgctatgggttgttcaagaaagcctcattcttttctgtgaccctttcgcttttgcattcaccctccttcccacctacctgtcctggggctgttgagcagcataataatcccgggagaatgattcccctcatagaaagacaaaagcatccatcccctcatagttaagtagccactggtgtcctgggaatttctggttggatttggtgccctgaacttttttattaagaaatcagatcccagggtgagagtaacaggccatttggccaagaaagaaacctgtttgtttttcttttgaactatgaaaagaccctgtttgtgaatatattttagaaagagaggaaggatgtctgcagaactttgttctgttttctgccacaaaaatgtgaatagttcagagtgaaaaccttttgtgatggttgatgtctcaggaataagctggatctccaatgttttggggatgctttgagtctcaaaaaaaattgataatcagaaaagtaatttttgtttgtttgtttaatgtatccctgttctgtttttaattaaactccaagtctcattttacatattcttggaaaaacctaagttgctctgtaatttacataagaagcatgctcaggacctctttgtaccccggggagcctgattctttgggaatgaagcttttcattcttcatacactggccttggcatcctgtggaatttgacccaactagcagctagtcagtctgtcagtgagcagaagagtgaactcttcttgatctttattgctatgtgtgaaaacttggcttcctcactgaacggtgaggaatggatttaaagcatgagctttagtagtatcaagatgccattttcctttttcttgctgtcttggggagcttctgcatgtgaccccctaatcagaaggcatgtttttagtatttcttgggagtgtcagctgtataatgcagcagctgttcaatcccttacccttctctgcaaggacttccttacagcttggtgcagttctttcccagaggccaccactactagacagtctttcttttatcttatggagataaattggcatttaaaaaataatttcacaaggcatgagataaactttcaatagatgatacctttgtgtcatgcctcatggaattatttttagaacaagccagagtccattgagtggtttacctctgcatgtttggagggaacctcacagatgaaacccttaatgaataatgtgtccggggttttttagagagaaggagcactcttaagttaccactttgagacagctcttaacatcttagtgaccatttgtagttttctttttatgaggaacccatgcttctatacttgggcggacaatcgagcttaatgagaagtgacttcccttcaaattccaacagcagacatgcattgtcatgattctgtcttctttttagtgtggtttattgagttcagcagttctcatattctgtttaaataggtacagcattttcaagggcacagatacagagaagctggctttctaggtattgggcttccaagccaagagttttgtccttccacctgtattagttatctattgctgtgtaaaaaattaccctaaatttagtatgttaaaatagtaaacattatctgtcagtttctgtgggttaagaatttgggagtagtttaacatgatggttctggcccatggtatcatgaagttacagtcaagattgaacaggggctgcagtcagctggagctggagaaaccacttccaagttctctctttgtggccgttggcaggatgcctcagtttcttcccatgtgggtctctgcgtagggcagcatgagtgtcctcacaccatgacacctggcttctccctgagcagctgattccagagatcatggggcagggccaggagaaagctgcagtgccttttaagacatagtcttggaaaggacacaccgtcacttcttatcctagttgttagaagcaagccactaagttcagcctgcactcaaggagagaggaattacacatacctctaccccaatggagcagtagcaaagaatttatggacatatcttaaaagcaccacaccccaactggggatgaaagtaggtcaacagggaggtaggtttaatctagataagctgaaagatagattgctatcaaaaacagttctccaagatgtgcatagccaaactgggatagaaggcaaactccccaaagctacctgctggttttgagaggggtggtaagacatggcaattcccaggagtagtagaaaataatatgcctgactaccaacagctcaagtatgcttatttgcacatcctagacttggtgtctgtaagactcagttaccacttttattttcctgtagctaggagttagcaaaaggaactggggccttccagccgagccactaaacctgtcttatttggaatggggattgtccagcaaagggagcaaacatgaattagatgttaagctattgagctgaagaaaagaaagcagttcacatttaggtgaaatagatgatgttatcaggaagccaggttcccaccagagtcggtgcttggtacctggtctctccagtctcaacagactcaggtcaggtctctcacccaggaagcaaccactcaataaaatagagaacatctgagaattacaaatgtctatgcttgattgctcctctaaatccagtgcataggttaaccctgcatgcccatttcttcctgggcttcttgatggcaatgtgttcttaaataactggtcttgtgttcatgctaaagacaaacttacatgaagtttttcagtttaagacattctagtgaatggctgctatgtgtttctggcactcattcctaaccaagtctttagagatttcagatgaccttaaagatgcaatatctttttctttctttctttctttctttttttctgagacaagagttgcgccctgtcgcccaggctggggtgctggagtgcagtggtgcgatctcagctcactgcagcctctgcttcccaggttcaagtgtttctcctgcctcagccttccgagtagctgggattacaggcatgtaccactatgcctggctaatttttatttctatatttttagtagagatggggtttcatcatgtttgccaggctggtctcgaactcctggcctcaagtgatccgcccacctcagcctcccaaagtgctgggattacaggcgcgagccaccgcgcctggccaaagatgcaaattcttgtttggatttatgctctgcctcttcccagcattttcttatctgtagccctgcttgcttgagagtatacttggataagaagtattgctgttgagggagctataagaaaaggattcttcttccagaagtaaagaactcatctttagagtacctttaaatgaattttgtttttctttcttattttgaggtggattggtcttctctttttttgggtttccagctcactgggactctcagaccttacctttccagctcaaacaccattagttaaattccttcattctcattagaatgcagcctgctgagtatgtgggtttcactgccggagtccatcatttagccagtatacatagaggaactgcttcgaatcaaggcaactggtgaagggcttagcatgttggcagcaatatcccagagattgaatctgtttgcattttcctcatctaggataacagctgcttgaagccagggctcttagccctttgcattccccttgagcgaggaagccacactgcctttctgtgtctggttcagagctcttccttcttggcatgttttctggactacatgcacatgggcagctatagattaatctgcaaaacctagtcacttacctacccataatatctgggaaggtgtggtatttgttttaaagaaacattgtttctttgggagggcagtttctgtctggactttgaggtggacttagttatccctacagttctttaactctcagcttttaataaaagatgaaatcagatattgatgcagttgggtcacaattctttagaatgcttctaccccagggccgcttcctgttcctagtcatggttttccagtttagtagtggagtttcttgaggctaacttacagaaatttctaactgaaaactttaagagttattgatacttgttttttcagtcagtcacttacatcacctagcctactctctggaatttaaatttatttctctaggctggtcctggaagttgataaccttttggcaaagcttagatttaggagaaggcttgagtccctgttcagcgggtctgtggattctctttgcttatggctctctgcctgcagccctggcagaccatactgtatgtcatggatacccagtggaaatattactgagatgaaacacatttccaagggtatttaaactctcactctgccacctttctaagggtgggaggctggcagagatgctgcaatgcttgataatcatttggccacactgaaatttccaaagggagctcttgccggtgcttaaaaccaaaactcctggacacttagaaaattccatgaatctagcacaaaatatccattcttgcccaagtgtatcccctttctctccagcttaatcttttttttttttttttttttaaagcccaggccaagggtacttttaactggaaactggggaggagggaagaacactagcagggagctaagaggcaggttgctgggtaagccatcctgctcctacctggtgcctgtatctacattgctgagtgctgtgcgccagtgcctttccttcatctgcagatggagcccatctctttccacctgggtgaggagaccctctgctactccaggggtaaaccttaaagaaggtgtcttgaagagcccagaggacactcacgtgctaaggtgtccattttatgcatctttaaaatattttatttaaaaaaaaaaatagccctgccctgtcttagtgccactaacggcccagttccatccattctgaatggaaaagcggagactgccagcactttccttggtcttccctttgtctcccatgatgtgttgttccctcatccctcccatccatttcactgtgtgtggatggatagcagagggtaccacgcagtccttgaggcagtcctgtgtgattccatgatcagttgtttttgtattttaactattcttccaaaccagcagatgtttggaaattaaggaaaaaattaaattctcatcaatggttgctgttatagttaaatcagtaaagatcttgagtatcaa

SEQ ID NO: 212 - protein, 120 aa, Homo sapiens
MSSSAGSGHQPSQSRAIPTRTVAISDAAQLPHDYCTTPGGTLFSTTPGGTRIIYDRKFLLDRRNSPMAQTPPCHLPNIPGVTSPGTLIEDSKVEVNNLNNLNNHDRKHAVGDDAQFEMDI

SEQ ID NO: 213 - DNA, 1383 bp, Homo sapiens
  CDS (1)..(972)
atgtcggccgccgtggcgtgcctggactacttcgccgccgagtgcctggtgtccatgtccgcgggcgccgtggttcaccgccgcccgccggaccccgagggcgcgggtggagccgcaggctcggaggtgggtgcggcgcatccggagtccgctctgccgggtccggggccatcggggcccgcgtcggtcccccagctcccgcaggtccccgcccccagccccggcgcgggcggcgccgcgccccacctgctggctgcaagcgtctgggcggacttgcgcggcagctctggcgagggctcctgggagaactcgggggaagctccacgcgcctcgtccggcttctccgacccgatcccgtgctccgtccagaccccgtgctccgagctggctcccgcctccggcgccgcggcggtctgcgctcccgagagctcctccgatgcgcccgccgtcccaagcgcgcctgctgccccgggcgcaccagcagcctctggtgggttctctggaggggccctaggggcaggccccgcccccgccgcggatcaggcgccccggaggaggtctgtcacacctgctgccaagcgccaccaatgccccttcccgggctgcaccaaagcctattacaagtcgtcgcacctcaagtcccaccagcgcacccacacgggtgagcgccctttctcctgcgactggctcgactgcgacaagaagtttacgcgttccgacgagctggcccgccactacaggacgcacacgggcgagaagcgcttctcctgccccctctgccccaagcagttctcccggagcgaccacctgaccaagcatgctcgccgccacccaacctatcatccagatatgatcgagtaccggggacgtcgtcgaactccccgcatcgacccgccactcaccagcgaggtggaaagctccgcctccggctccggtcccggcccggcgcccagcttcaccacctgcctgtaggacagtcattgctgtcagtcttaccctcaaggatgatcccccaggccgttgtccctgctttctctctgcccatccttctttcccagagtcattacaccaaggcacagactggttcctctgctctgagggtgggtccaggcagacatgtggactctggggaggtactgggggccggaaaatagcgggaattcttgcaacgtgtatatcatcctaaaagtgggggttgcctcaagacagcccccaggaactgataagaagggatgaactcccgtactctccagagtactgaagattctcccctccctggaaccagggatgtgaaactggaattctcagatgcctgaggagctcccagtctcaaaggactctggtgtctcacccatccaccaggcggaccttggagagggtgtc

SEQ ID NO: 214 - protein, 323 aa, Homo sapiens
MSAAVACLDYFAAECLVSMSAGAVVHRRPPDPEGAGGAAGSEVGAAHPESALPGPGPSGPASVPQLPQVPAPSPGAGGAAPHLLAASVWADLRGSSGEGSWENSGEAPRASSGFSDPIPCSVQTPCSELAPASGAAAVCAPESSSDAPAVPSAPAAPGAPAASGGFSGGALGAGPAPAADQAPRRRSVTPAAKRHQCPFPGCTKAYYKSSHLKSHQRTHTGERPFSCDWLDCDKKFTRSDELARHYRTHTGEKRFSCPLCPKQFSRSDHLTKHARRHPTYHPDMIEYRGRRRTPRIDPPLTSEVESSASGSGPGPAPSFTTCL

SEQ ID NO: 215 - DNA, 2499 bp, Homo sapiens
  CDS (85)..(1305)
acaaccaggcggcagcggatacaaggccaggcggcggcgggcgggcggacctgcgccctgagcctttctgcgcccgcgggcaccatgagcagccgagtcggggacctgagcccccagcagcaggaagcgctggccaggttccgggagaacctccaggacctgctgcccatactgcccaatgctgatgactacttcctcctgcgctggctgcgagctcgaaactttgacctgcagaaatccgaagacatgctccgaaggcacatggagttccggaagcaacaagacctggacaacattgtcacatggcagccccctgaggtcatccagctgtatgactcgggtggtctttgtggctacgactacgaaggctgccctgtgtacttcaacatcattgggtccctcgaccccaagggtctcctgctgtcagcctccaagcaggatatgatccggaagcgcatcaaagtctgtgagctgctgttgcatgagtgtgagctgcaaactcagaagctgggcaggaagatcgagatggcgctgatggtgtttgacatggaggggctgagcctgaaacacctgtggaagccagctgtggaggtctaccagcagttttttagcatcctggaagcaaattatcctgagaccctgaagaatttaattgttattcgagccccaaaactgttccccgtggccttcaacttggtcaagtcgttcatgagtgaggagacacgcaggaagattgtgattctgggagacaactggaagcaggagctgacaaaattcatcagccccgaccagctgcctgtggagtttggggggaccatgactgaccccgatggcaaccccaagtgcctgaccaagatcaactatgggggtgaggtgcccaagagctactacctgtgcgagcaggtgaggctgcagtatgagcacacgaggtccgtgggccgcggctcctccctgcaggtggagaacgagatcctgttcccgggctgtgtgctcaggtggcagtttgcttcagatggtggggacatcggctttggggttttcctgaagaccaagatgggggagcagcagagtgctagggagatgacggaggtgctgcccagccagcgctacaatgcccacatggtgcctgaggatgggagcctcacctgcctccaggctggcgtctatgtcctgcgcttcgacaacacctacagccggatgcatgccaagaagctcagctacactgtggaggtgctgcttcccgacaaggcctctgaggagacgctgcagagtctcaaggcgatgagaccctccccaacacagtgaagaccccagccacctctacctgtgcactccaaccccttcacacccacccctctgacccctgccttcccaggcagggtggtgctggaggtggctgcagagagccacttgtcccacgtcaccatttcatctcattgtaggctcacctggcacagtggccaagcaggaaggggccaccagtgcatagcccatgctgaagattcagacaggaacctctttccctgttcccagagaatgcggctgagaatgagaacgctgaagatgatccagtccactgaggatgggtcctgcttgcagaagctgccctttcacccatcttgacaagatccagccacccaggactcacccatgcctggtgttccagcttcagggggtgtgcgtggttcctaggtcctgtggacatcacagcttcaggcctgaagagcagagaagccctgttctctgcatgtaggaggtcagcaggggtgggcaggcccagctggaggcagctgggtgagggtcctggttccagcagagcactggggcccatccaagtttgttctgccaccactggatggaaaattggaaatggactgggcgtggtggctcacgcctataatcccagcagtttgggaggctgagttgggcagatcacctgagatcaggagttcgggaccagcctgggcaacatggtgaaaccctgtctctactaaaaatacaaaaattagccgggcatggtggcgtgcacctgtaatcccagctactcaggaggctgaggcaggagaatcgcttgtacccaggaggcggaggttgtagtgagctgagatcgtgccactgcactccagcctgggcaacagagccagactccgtctctaaacaaacaaacaaacaaacaaacaaataaagaaagaacattggacatggagaggtggggcctggcatgggtaaccatcagaggaaaaagccatgctcagccttccagttgagtgggtaacgactgagtctccagggaattcccagtgacctcccctccacacctgctgtgatcctgccaacatttagctttggttctcttggcagctgcaccattcatgggtgcatatacgtagagtctgaacaggtgctctgctgctagaaacagcaaaccatctagattaaactcctaaagccagtgccacgaggcattcctgttccaactgggtgtttgagcagattggc

SEQ ID NO: 216 - protein, 406 aa, Homo sapiens
MSSRVGDLSPQQQEALARFRENLQDLLPILPNADDYFLLRWLRARNFDLQKSEDMLRRHMEFRKQQDLDNIVTWQPPEVIQLYDSGGLCGYDYEGCPVYFNIIGSLDPKGLLLSASKQDMIRKRIKVCELLLHECELQTQKLGRKIEMALMVFDMEGLSLKHLWKPAVEVYQQFFSILEANYPETLKNLIVIRAPKLFPVAFNLVKSFMSEETRRKIVILGDNWKQELTKFISPDQLPVEFGGTMTDPDGNPKCLTKINYGGEVPKSYYLCEQVRLQYEHTRSVGRGSSLQVENEILFPGCVLRWQFASDGGDIGFGVFLKTKMGEQQSAREMTEVLPSQRYNAHMVPEDGSLTCLQAGVYVLRFDNTYSRMHAKKLSYTVEVLLPDKASEETLQSLKAMRPSPTQ

SEQ ID NO: 217 - DNA, 1996 bp, Homo sapiens
  CDS (78)..(947)
agacgcctgagtcggagagacagggggcagaggttgccaagccctggctgccacttgtcaggttccctgtgctagacatgcataatctgtattccatcactgggtacccggacccaccagggaccatggaggaggaggaggaggatgatgactatgagaactcaacacctccctacaaggaccttcctcccaagccagggaccatggaggaggaggaggaggatgatgactatgagaactcaacacctccctacaaggaccttcctcccaagccagccctcaccctgagcttctcttctccaggttcaagtgctccaccaagacctccaagggcagcaaaggaaacagagaaacccccacttccttgcaagccccggaacatgacaggcctggacctcgccgctgtcacctgtccacctcctcaactggctgtgaatcttgagccttctccattgcagccatccctggccgcaactccagtcccctggctcaatcagaggtctggaggtcctggctgctgccagaagaggtggatggtgtacctgtgtctgctggtggtgacttccctgttcctgggctgccttggtctcactgtgaccctgattaagtaccaggagttgatggaagaactgagaatgttaagctttcagcagatgacgtggcgaacaaatatgactggcatggcagggctagctggcctgaagcatgacattgcccgtgtaagagctgacaccaaccagtccctggtggaactttggggcttattagactgccgccgaattacctgtcctgaaggctggctgccctttgagggcaagtgttactacttctccccaagcaccaagtcatgggatgaggcccggatgttctgccaggagaattactctcacttggtcatcatcaatagctttgctgagcaccttctgggagccagaggaacccaataacatccacgatgaggactgtgctaccatgaacaaaggtggcacctggaatgatctctcttgctacaaaactacgtattggatttgtgagcggaaatgttcctgttgaagcccagggccgaggctgggggtccatatctgagtgtctctttgagatgagaatctcctgccctttcgtggacggccttgcctcttcgtgagtggacacacagatgtgcctcaaacaggattggcaccctggatgcagcaagttcccaggggtgcaagtcaggctgtttctagagtgaggacttgggcttgccctagtagatggtgagctgggaggatgctcagagcttggtggtgggaggtctcccacttctggggttgaaaggatcttcactaagttcctgatcatgactcttgggaagtgatactagccctgaggaccctggggctggtgttgaacctgggatgaaatatcctggcgcctgtgaaccacaaagagctgggactgggctccttttcctgcagcctcaaacttctgggctcaggtgatcctcccatctcagcctcctgagtagctgggactacacatgcgcaccaccatgcctggccaattttttgtagcatttaaagagagggagtctcactatgttgcccaggccagtctcaaactccttgcctcaatggatcctcctacttgggcttcccaaattgtgaggattacaggtgtgagccactgtgcctggctcaaaattattattattatttttatagagatgaggtctcactctgttgccgaggctggtctcaaactcctggggtcaagcaatccttccgtgatggcctcccaaagtgctgggattacaggcatgtgtcaccgtacctggccgatatttttatttttatttttactttccccatcttttccttttttttttttttccaaacaaaagctttgaaagtggtgacagaaaaatttccctttgagctagacctctagatctgcctcgcacagaaatacattaagtgggctggtctcatgtagtccccacatcattgcaaattac

SEQ ID NO: 218 - protein, 289 aa, Homo sapiens
MHNLYSITGYPDPPGTMEEEEEDDDYENSTPPYKDLPPKPGTMEEEEEDDDYENSTPPYKDLPPKPALTLSFSSPGSSAPPRPPRAAKETEKPPLPCKPRNMTGLDLAAVTCPPPQLAVNLEPSPLQPSLAATPVPWLNQRSGGPGCCQKRWMVYLCLLVVTSLFLGCLGLTVTLIKYQELMEELRMLSFQQMTWRTNMTGMAGLAGLKHDIARVRADTNQSLVELWGLLDCRRITCPEGWLPFEGKCYYFSPSTKSWDEARMFCQENYSHLVIINSFAEHLLGARGTQ

SEQ ID NO: 219 - DNA, 2545 bp, Homo sapiens
  CDS (375)..(2027)
atctgcctgactttcacttttggtgctggagaactcagaaggtggctcagccctctggtccacacttggtgggcagctcggatgccccaggcagcccgggcacagtgagcttagtccccttcaccccctccgcagagctctggggcatccgcacagtcactcctggacacaagataaggaggagtttccccgaggcatcacagggcttcccgggactgagggactgactcaactggttattggacagtgccccacccccaatccggctgaggggcaggaaggcagaaggtcttggtggccctggatcttgtggctgcaatcggttccaaacagcagttaggtcagcagtccgctcagccgaggcagctctgttcatggcgttctcgaagctcttggagcaagccggaggcgtgggcctcttccagaccctgcaggtgctcaccttcatcctcccctgcctcatgataccttcccagatgctcctggagaacttctcagccgccatcccaggccaccgatgctggacacacatgctggacaatggctctgcggtttccacaaacatgacccccaaggcccttctgaccatctccatcccgccaggccccaaccaggggccccaccagtgccgccgcttccgccagccacagtggcagctcttggaccccaatgccacggccaccagctggagcgaagctgacacggagccgtgtgtggacggctgggtctatgaccgcagcgtcttcacctccaccatcgtggccaagtgggacctggtgtgcagctcccagggcttgaagcccctaagccagtccatcttcatgtccgggatcctggtgggctcctttatctggggcctcctctcctaccggtttgggaggaagccgatgctgagctggtgctgcctgcagttggccgtggcgggcaccagcaccatcttcgccccaacattcgtcatctactgcggcctgcggttcgtggccgcttttgggatggccggcatctttctgagttcactgacactgatggtggagtggaccacgaccagcaggagggcggtcaccatgacggtggtgggatgtgccttcagcgcaggccaggcggcgctgggcggcctggcctttgccctgcgggactggaggactctccagctggcagcatcagtgcccttctttgccatctccctgatatcctggtggctgccagaatccgcccggtggctgattattaagggcaaaccagaccaagcacttcaggagctcagaaaggtggccaggataaatggccacaaggaggccaagaacctgaccatagaggtgctgatgtccagcgtgaaggaggaggtggcctctgcaaaggagccgcggtcggtgctggacctgttctgcgtgcccgtgctccgctggaggagctgcgccatgctggtggtgaatttctctctattgatctcctactatgggctggtcttcgacctgcagagcctgggccgtgacatcttcctcctccaggccctcttcggggccgtggacttcctgggccgggccaccactgccctcttgctcagtttccttggccgccgcaccatccaggcgggttcccaggccatggccggcctcgccattctagccaacatgctggtgccgcaagatttgcagaccctgcgtgtggtctttgctgtgctgggaaagggatgttttgggataagcctaacctgcctcaccatctacaaggctgaactctttccaacgccagtgcggatgacagcagatggcattctgcatacagtgggccggctgggggctatgatgggtcccctgatcctgatgagccgccaagccctgcccctgctgcctcctctcctctatggcgttatctccattgcttccagcctggttgtgctgttcttcctcccggagacccagggacttccgctccctgacactatccaggacctggagagccagaaatcaacagcagcccagggcaaccggcaagaggccgtcactgtggaaagtacctcgctctagaaattgtgcctgcatggagcccctttagtcaaagactcctggaaaggagttgcctcttctccaatcagagcgtggaggcgagttgggcgacttcaagggcctggcatggcagaggccaggcagccgtggccgagtggacagcgtggccgtctgctgtggctgaaggcagcttccacagctcactcctcttctccctgccctgatcagattccccaccttacccgggccctacaggagcctgtgcagatggccatgcccaaccaataacgagacggttcccctccctttccctgccaggctcatgtctttacaccttcactcagccacgccaaccagagactgggttccaatctcaccccaccacatacagagccctcatctgtgaaatgagaatgatcacgtgacccaccccccagggcaggtatcagggtgaactgatcttagcaccggccaaataaatggaacctgctgagagagctgccagaaaaaaaaaaaaaaaaaaaaaaaaaaaaaaaaaa

SEQ ID NO: 220 - protein, 550 aa, Homo sapiens
MAFSKLLEQAGGVGLFQTLQVLTFILPCLMIPSQMLLENFSAAIPGHRCWTHMLDNGSAVSTNMTPKALLTISIPPGPNQGPHQCRRFRQPQWQLLDPNATATSWSEADTEPCVDGWVYDRSVFTSTIVAKWDLVCSSQGLKPLSQSIFMSGILVGSFIWGLLSYRFGRKPMLSWCCLQLAVAGTSTIFAPTFVIYCGLRFVAAFGMAGIFLSSLTLMVEWTTTSRRAVTMTVVGCAFSAGQAALGGLAFALRDWRTLQLAASVPFFAISLISWWLPESARWLIIKGKPDQALQELRKVARINGHKEAKNLTIEVLMSSVKEEVASAKEPRSVLDLFCVPVLRWRSCAMLVVNFSLLISYYGLVFDLQSLGRDIFLLQALFGAVDFLGRATTALLLSFLGRRTIQAGSQAMAGLAILANMLVPQDLQTLRVVFAVLGKGCFGISLTCLTIYKAELFPTPVRMTADGILHTVGRLGAMMGPLILMSRQALPLLPPLLYGVISIASSLVVLFFLPETQGLPLPDTIQDLESQKSTAAQGNRQEAVTVESTSL

SEQ ID NO: 221 - DNA, 5680 bp, Homo sapiens
  CDS (204)..(3479)
aacgggctcattcagcggtcgcgagctgcccgcgagggggagcggccggacggagagcgcgacccgtcccgggggtggggccgggcgcagcggcgagaggaggcgaaggtggctgcggtagcagcagcgcggcagcctcggacccagcccggagcgcagggcggccgctgcaggtccccgctcccctccccgtgcgtccgcccatggccgccgccgggcagctgtgcttgctctacctgtcggcggggctcctgtcccggctcggcgcagccttcaacttggacactcgggaggacaacgtgatccggaaatatggagaccccgggagcctcttcggcttctcgctggccatgcactggcaactgcagcccgaggacaagcggctgttgctcgtgggggccccgcgggcagaagcgcttccactgcagagagccaacagaacgggagggctgtacagctgcgacatcaccgcccgggggccatgcacgcggatcgagtttgataacgatgctgaccccacgtcagaaagcaaggaagatcagtggatgggggtcaccgtccagagccaaggtccagggggcaaggtcgtgacatgtgctcaccgatatgaaaaaaggcagcatgttaatacgaagcaggaatcccgagacatctttgggcggtgttatgtcctgagtcagaatctcaggattgaagacgatatggatgggggagattggagcttttgtgatgggcgattgagaggccatgagaaatttggctcttgccagcaaggtgtagcagctacttttactaaagactttcattacattgtatttggagccccgggtacttataactggaaagggattgttcgtgtagagcaaaagaataacactttttttgacatgaacatctttgaagatgggccttatgaagttggtggagagactgagcatgatgaaagtctcgttcctgttcctgctaacagttacttaggtttttctttggactcagggaaaggtattgtttctaaagatgagatcacttttgtatctggtgctcccagagccaatcacagtggagccgtggttttgctgaagagagacatgaagtctgcacatctcctccctgagcacatattcgatggagaaggtctggcctcttcatttggctatgatgtggcggtggtggacctcaacaaggatgggtggcaagatatagttattggagccccacagtattttgatagagatggagaagttggaggtgcagtgtatgtctacatgaaccagcaaggcagatggaataatgtgaagccaattcgtcttaatggaaccaaagattctatgtttggcattgcagtaaaaaatattggagatattaatcaagatggctacccagatattgcagttggagctccgtatgatgacttgggaaaggtttttatctatcatggatctgcaaatggaataaataccaaaccaacacaggttctcaagggtatatcaccttattttggatattcaattgctggaaacatggaccttgatcgaaattcctaccctgatgttgctgttggttccctctcagattcagtaactattttcagatcccggcctgtgattaatattcagaaaaccatcacagtaactcctaacagaattgacctccgccagaaaacagcgtgtggggcgcctagtgggatatgcctccaggttaaatcctgttttgaatatactgctaaccccgctggttataatccttcaatatcaattgtgggcacacttgaagctgaaaaagaaagaagaaaatctgggctatcctcaagagttcagtttcgaaaccaaggttctgagcccaaatatactcaagaactaactctgaagaggcagaaacagaaagtgtgcatggaggaaaccctgtggctacaggataatatcagagataaactgcgtcccattcccataactgcctcagtggagatccaagagccaagctctcgtaggcgagtgaattcacttccagaagttcttccaattctgaattcagatgaacccaagacagctcatattgatgttcacttcttaaaagagggatgtggagacgacaatgtatgtaacagcaaccttaaactagaatataaattttgcacccgagaaggaaatcaagacaaattttcttatttaccaattcaaaaaggtgtaccagaactagttctaaaagatcagaaggatattgctttagaaataacagtgacaaacagcccttccaacccaaggaatcccacaaaagatggcgatgacgcccatgaggctaaactgattgcaacgtttccagacactttaacctattctgcatatagagaactgagggctttccctgagaaacagttgagttgtgttgccaaccagaatggctcgcaagctgactgtgagctcggaaatccttttaaaagaaattcaaatgtcactttttatttggttttaagtacaactgaagtcacctttgacaccccagatctggatattaatctgaagttagaaacaacaagcaatcaagataatttggctccaattacagctaaagcaaaagtggttattgaactgcttttatcggtctcgggagttgctaaaccttcccaggtgtattttggaggtacagttgttggcgagcaagctatgaaatctgaagatgaagtgggaagtttaatagagtatgaattcagggtaataaacttaggtaaacctcttacaaacctcggcacagcaaccttgaacattcagtggccaaaagaaattagcaatgggaaatggttgctttatttggtgaaagtagaatccaaaggattggaaaaggtaacttgtgagccacaaaaggagataaactccctgaacctaacggagtctcacaactcaagaaagaaacgggaaattactgaaaaacagatagatgataacagaaaattttctttatttgctgaaagaaaataccagactcttaactgtagcgtgaacgtgaactgtgtgaacatcagatgcccgctgcgggggctggacagcaaggcgtctcttattttgcgctcgaggttatggaacagcacatttctagaggaatattccaaactgaactacttggacattctcatgcgagccttcattgatgtgactgctgctgccgaaaatatcaggctgccaaatgcaggcactcaggttcgagtgactgtgtttccctcaaagactgtagctcagtattcgggagtaccttggtggatcatcctagtggctattctcgctgggatcttgatgcttgctttattagtgtttatactatggaagtgtggattctttaaacgctctaggtacgatgacagtgttccccgataccatgctgtaaggatccggaaagaagagcgagagatcaaagatgaaaagtatattgataaccttgaaaaaaaacagtggatcacaaagtggaacgaaaatgaaagctactcatagcgggggcctaaaaaaaaaaagcttcacagtacccaaactgctttttccaactcagaaattcaatttggatttaaaagcctgctcaatccctgaggactgatttcagagtgactacacacagtacgaacctacagttttaactgtggatattgttacgtagcctaaggctcctgttttgcacagccaaatttaaaactgttggaatggatttttctttaactgccgtaatttaactttctgggttgcctttatttttggcgtggctgacttacatcatgtgttggggaagggcctgcccagttgcactcaggtgacatcctccagatagtgtagctgaggaggcacctacactcacctgcactaacagagtggccgtcctaacctcgggcctgctgcgcagacgtccatcacgttagctgtcccacatcacaagactatgccattggggtagttgtgtttcaacggaaagtgctgtcttaaactaaatgtgcaatagaaggtgatgttgccatcctaccgtcttttcctgtttcctagctgtgtgaatacctgctcacgtcaaatgcatacaagtttcattctccctttcactaaaacacacaggtgcaacagacttgaatgctagttatacttatttgtatatggtatttattttttcttttctttacaaaccattttgttattgactaacaggccaaagagtctccagtttacccttcaggttggtttaatcaatcagaattagagcatgggaggtcatcactttgacctaaattatttactgcaaaaagaaaatctttataaatgtaccagagagagttgttttaataacttatctataaactataacctctccttcatgacagcctccaccccacaacccaaaaggtttaagaaatagaattataactgtaaagatgtttatttcaggcattggatattttttactttagaagcctgcataatgtttctggatttcatactgtaacattcaggaattcttggagaaaatgggtttattcactgaactctagtgcggtttactcactgctgcaaatactgtatattcaggacttgaaagaaatggtgaatgcctatggtggatccaaactgatccagtataagactactgaatctgctaccaaaacagttaatcagtgagtcgatgttctattttttgttttgtttcctcccctatctgtattcccaaaaattactttggggctaatttaacaagaactttaaattgtgttttaattgtaaaaatggcagggggtggaattattactctatacattcaacagagactgaatagatatgaaagctgattttttttaattaccatgcttcacaatgttaagttatatggggagcaacagcaaacaggtgctaatttgttttggatatagtataagcagtgtctgtgttttgaaagaatagaacacagtttgtagtgccactgttgttttgggggggcttttttcttttcggaaatcttaaaccttaagatactaaggacgttgttttggttgtactttggaattcttagtcacaaaatatattttgtttacaaaaatttctgtaaaacaggttataacagtgtttaaagtctcagtttcttgcttggggaacttgtgtccctaatgtgtttagattgctagattgctaaggagctgatactttgacagtgtttttagacctgtgttactaaaaaaaagatgaatgtcctgaaaagggtgttgggagggtggttcaacaaagaaacaaagatgttatggtgtttagatttatggttgttaaaaatgtcatctcaagtcaagtcactggtctgtttgcatttgatacatttttgtactaactagcattgtaaaattatttcatgattagaaattacctgtggatatttgtataaaagtgtgaaataaattttttataaaagtgttcattgtttcgtaacacagcattgtatatgtgaagcaaactctaaaattataaatgacaacctgaattatctatttcatcaaaccaaagttcagtgtttttatttttggtgtctcatgtaatctcagatcagccaaagatactagtgccaaagcaatgggattcggggtttttttctgttttcgctctatgtaggtgatcctcaagtctttcattttccttctttatgattaaaagaaacctacaggtatttaacaacc

SEQ ID NO: 222 - protein, 1091 aa, Homo sapiens
MAAAGQLCLLYLSAGLLSRLGAAFNLDTREDNVIRKYGDPGSLFGFSLAMHWQLQPEDKRLLLVGAPRAEALPLQRANRTGGLYSCDITARGPCTRIEFDNDADPTSESKEDQWMGVTVQSQGPGGKVVTCAHRYEKRQHVNTKQESRDIFGRCYVLSQNLRIEDDMDGGDWSFCDGRLRGHEKFGSCQQGVAATFTKDFHYIVFGAPGTYNWKGIVRVEQKNNTFFDMNIFEDGPYEVGGETEHDESLVPVPANSYLGFSLDSGKGIVSKDEITFVSGAPRANHSGAVVLLKRDMKSAHLLPEHIFDGEGLASSFGYDVAVVDLNKDGWQDIVIGAPQYFDRDGEVGGAVYVYMNQQGRWNNVKPIRLNGTKDSMFGIAVKNIGDINQDGYPDIAVGAPYDDLGKVFIYHGSANGINTKPTQVLKGISPYFGYSIAGNMDLDRNSYPDVAVGSLSDSVTIFRSRPVINIQKTITVTPNRIDLRQKTACGAPSGICLQVKSCFEYTANPAGYNPSISIVGTLEAEKERRKSGLSSRVQFRNQGSEPKYTQELTLKRQKQKVCMEETLWLQDNIRDKLRPIPITASVEIQEPSSRRRVNSLPEVLPILNSDEPKTAHIDVHFLKEGCGDDNVCNSNLKLEYKFCTREGNQDKFSYLPIQKGVPELVLKDQKDIALEITVTNSPSNPRNPTKDGDDAHEAKLIATFPDTLTYSAYRELRAFPEKQLSCVANQNGSQADCELGNPFKRNSNVTFYLVLSTTEVTFDTPDLDINLKLETTSNQDNLAPITAKAKVVIELLLSVSGVAKPSQVYFGGTVVGEQAMKSEDEVGSLIEYEFRVINLGKPLTNLGTATLNIQWPKEISNGKWLLYLVKVESKGLEKVTCEPQKEINSLNLTESHNSRKKREITEKQIDDNRKFSLFAERKYQTLNCSVNVNCVNIRCPLRGLDSKASLILRSRLWNSTFLEEYSKLNYLDILMRAFIDVTAAAENIRLPNAGTQVRVTVFPSKTVAQYSGVPWWIILVAILAGILMLALLVFILWKCGFFKRSRYDDSVPRYHAVRIRKEEREIKDEKYIDNLEKKQWITKWNENESYS

SEQ ID NO: 223 - DNA, 303 bp, Homo sapiens
  CDS (1)..(303)
atgcgcccaattgtggtcaagaccaagaaactgagaaacaaagcaaatccgtgggatgcagagggtacgctgatgacttctgctggggagagaagcccaaacacacgtcctgggcagagcccagagaccgggagtgtggctgccagtgagcacccggctgagggacaagcaggtgggcctcagtggtggctgccaggtccctggaagccgggggccaccggccttgcctctcctctgcctcggaagcaccggaggctttggggatctggtggtcctccggccctgaacgtggacctggtgtga

SEQ ID NO: 224 - protein, 100 aa, Homo sapiens
MRPIVVKTKKLRNKANPWDAEGTLMTSAGERSPNTRPGQSPETGSVAASEHPAEGQAGGPQWWLPGPWKPGATGLASPLPRKHRRLWGSGGPPALNVDLV

SEQ ID NO: 225 - DNA, 1455 bp, Homo sapiens
  CDS (148)..(888)
aagcaccgataggctctgcctcccgaagaaaagggagccgcgcagcgcctacgggagtccggcggcagcagccggtaccggcaaccacgggcagctctcagggaatctccgtcgtgaggccagaggctccagtccccgcgagtccagatgcctgtccagcctccaagcaaagacacagaagagatggaagcagagggtgattctgctgctgagatgaatggggaggaggaagagagtgaggaggagcggagcggcagccagacagagtcagaagaggagagctccgagatggatgatgaggactatgagcgacgccgcagcgagtgtgtcagtgagatgctggacctagagaagcagttctcggagctaaaggagaagttgttcagggaacgactgagtcagctgcggttgcggctggaggaagtgggggctgagagagcccctgaatacacggagccccttggggggctgcagcggagcctcaagattcgcattcaggtggcagggatctacaagggcttctgtctggatgtgatcaggaataagtacgaatgtgagctgcagggagccaaacagcacctggagagtgagaagctgctgctctatgacacgctgcagggggagctgcaggagcggatccagaggctggaggaggaccgccagagcctggacctcagctctgaatggtgggatgacaaactgcacgccagaggcagctccaggtcttgggactccctgccgcccagcaagaggaagaaggcacctctggtttctggcccatacatcgtgtacatgcttcaagagatcgacatcctggaggactggacagccatcaaaaaggctagggcagctgtgtcccctcagaagagaaaatcggatggaccttgaccctgctgttcacagccagggggaccctcagagcagctggcactgcacccaggattctcgtcttcctcctgcagacaggcggacccacaggcccctcagggtctgcccagccaggctcctgtggtgctgctgggccctcccactccatctggcactggcctggactcctcctctgccctcctcgaggcctgcacagctgtggccgtggagctgacctgaccaggcaaggctgctgtctccatccctgagccgcctgccacctcccactcctgaagatccatctcttggggctcccctgacagagaagacagccgaagtcaaagccacatcctcttgctgatgttggatgcaggctgtccggcctcagggccagggagccagtttccactgtgcgggaactctgagtcagacgtgattatctgggggtctgtccaccctggctggatctggaggcaagatgccaggccccccaggtgttctcagggcagttcttggtgtctgcttctcagattccaaggactggaattaaaacctttcctgggactctggaaaaaaaaaaaaaaaaaa

SEQ ID NO: 226 - protein, 246 aa, Homo sapiens
MPVQPPSKDTEEMEAEGDSAAEMNGEEEESEEERSGSQTESEEESSEMDDEDYERRRSECVSEMLDLEKQFSELKEKLFRERLSQLRLRLEEVGAERAPEYTEPLGGLQRSLKIRIQVAGIYKGFCLDVIRNKYECELQGAKQHLESEKLLLYDTLQGELQERIQRLEEDRQSLDLSSEWWDDKLHARGSSRSWDSLPPSKRKKAPLVSGPYIVYMLQEIDILEDWTAIKKARAAVSPQKRKSDGP

SEQ ID NO: 227 - DNA, 1690 bp, Homo sapiens
  CDS (146)..(640)
tgctttctcaaaggccccacagtcctccacttcctggggaggtagctgcagaataaaaccagcagagactccttttctcctaaccgtcccggccaccgctgcctcagcctctgcctcccagcctctttctgagggaaaggacaagatgaagtggaaggcgcttttcaccgcggccatcctgcaggcacagttgccgattacagaggcacagagctttggcctgctggatcccaaactctgctacctgctggatggaatcctcttcatctatggtgtcattctcactgccttgttcctgagagtgaagttcagcaggagcgcagacgcccccgcgtaccagcagggccagaaccagctctataacgagctcaatctaggacgaagagaggagtacgatgttttggacaagagacgtggccgggaccctgagatggggggaaagccgcagagaaggaagaaccctcaggaaggcctgtacaatgaactgcagaaagataagatggcggaggcctacagtgagattgggatgaaaggcgagcgccggaggggcaaggggcacgatggcctttaccagggtctcagtacagccaccaaggacacctacgacgcccttcacatgcaggccctgccccctcgctaacagccaggggatttcaccactcaaaggccagacctgcagacgcccagattatgagacacaggatgaagcatttacaacccggttcactcttctcagccactgaagtattcccctttatgtacaggatgctttggttatatttagctccaaaccttcacacacagactgttgtccctgcactctttaagggagtgtactcccagggcttacggccctggccttgggccctctggtttgccggtggtgcaggtagacctgtctcctggcggttcctcgttctccctgggaggcgggcgcactgcctctcacagctgagttgttgagtctgttttgtaaagtccccagagaaagcgcagatgctagcacatgccctaatgtctgtatcactctgtgtctgagtggcttcactcctgctgtaaatttggcttctgttgtcaccttcacctcctttcaaggtaactgtactgggccatgttgtgcctccctggtgagagggccgggcagaggggcagatggaaaggagcctaggccaggtgcaaccagggagctgcaggggcatgggaaggtgggcgggcaggggagggtcagccagggcctgcgagggcagcgggagcctccctgcctcaggcctctgtgccgcaccattgaactgtaccatgtgctacaggggccagaagatgaacagactgaccttgatgagctgtgcacaaagtggcataaaaaacatgtggttacacagtgtgaataaagtgctgcggagcaagaggaggccgttgattcacttcacgctttcagcgaatgacaaaatcatctttgtgaaggcctcgcaggaagacccaacacatgggacctataactgcccagcggacagtggcaggacaggaaaaacccgtcaatgtactaggatactgctgcgtcattacagggcacaggccatggatggaaaacgctctctgctctgctttttttctactgttttaatttatactggcatgctaaagccttcctattttgcataataaatgcttcagtgaaaatgcaaaaaaaaaa

SEQ ID NO: 228 - protein, 164 aa, Homo sapiens
MKWKALFTAAILQAQLPITEAQSFGLLDPKLCYLLDGILFIYGVILTALFLRVKFSRSADAPAYQQGQNQLYNELNLGRREEYDVLDKRRGRDPEMGGKPQRRKNPQEGLYNELQKDKMAEAYSEIGMKGERRRGKGHDGLYQGLSTATKDTYDALHMQALPPR

SEQ ID NO: 229 - DNA, 1057 bp, Homo sapiens
  CDS (11)..(952)
accagaagagatggagctggacagagctgtgggggtcctgggcgctgccaccctgctgctctctttcctgggcatggcctgggctctccaggcggcagacacctgtccagaggtgaagatggtgggcctggagggctctgacaagctcaccattctccgaggctgtccggggctgcctggggcccctgggcccaagggagaggcaggcaccaatggaaagagaggagaacgtggcccccctggacctcctgggaaggcaggaccacctgggcccaacggagcacctggggagccccagccgtgcctgacaggcccgcgtacctgcaaggacctgctagaccgagggcacttcctgagcggctggcacaccatctacctgcccgactgccggcccctgactgtgctctgtgacatggacacggacggagggggctggaccgttttccagcggagggtggatggctctgtggacttctaccgggactgggccacgtacaagcagggcttcggcagtcggctgggggagttctggctggggaatgacaacatccacgccctgaccgcccagggaaccagcgagctccgtgtagacctggtggactttgaggacaactaccagtttgctaagtacagatcattcaaggtggccgacgaggcggagaagtacaatctggtcctgggggccttcgtggagggcagtgcgggagattccctgacgttccacaacaaccagtccttctccaccaaagaccaggacaatgatcttaacaccggaaattgtgctgtgatgtttcagggagcttggtggtacaaaaactgccatgtgtcaaacctgaatggtcgctacctcagggggactcatggcagctttgcaaatggcatcaactggaagtcggggaaaggatacaattatagctacaaggtgtcagagatgaaggtgcgacctgcctagcccaggccggcctcagggtcaggacgcctccacacatagttggttggggggtagggttgggagcttggccctacggtttgtaaaagaaacacatgtcgtgattct

SEQ ID NO: 230 - protein, 313 aa, Homo sapiens
MELDRAVGVLGAATLLLSFLGMAWALQAADTCPEVKMVGLEGSDKLTILRGCPGLPGAPGPKGEAGTNGKRGERGPPGPPGKAGPPGPNGAPGEPQPCLTGPRTCKDLLDRGHFLSGWHTIYLPDCRPLTVLCDMDTDGGGWTVFQRRVDGSVDFYRDWATYKQGFGSRLGEFWLGNDNIHALTAQGTSELRVDLVDFEDNYQFAKYRSFKVADEAEKYNLVLGAFVEGSAGDSLTFHNNQSFSTKDQDNDLNTGNCAVMFQGAWWYKNCHVSNLNGRYLRGTHGSFANGINWKSGKGYNYSYKVSEMKVRPA

SEQ ID NO: 231 - DNA, 2448 bp, Homo sapiens
  CDS (141)..(2012)
gtcaccgccgaatggcagcctccagaaagccaccgcgagtaagggtgaatcaccaggattttcaactgagaaatttaagaataattgaacctaacgaggtgacacactcaggagacacaggtgtggaaacagacggcagaatgcctccaaaggtgacttcagagctgcttcggcagctgagacaagccatgaggaactctgagtatgtgaccgaaccgatccaggcctacatcatcccatcgggagatgctcatcagagtgagtatattgctccatgtgactgtcggcgggcttttgtctctggattcgatggctctgcgggcacagccatcatcacagaagagcatgcagccatgtggactgacgggcgctactttctccaggctgccaagcaaatggacagcaactggacacttatgaagatgggtctgaaggacacaccaactcaggaagactggctggtgagtgtgcttcctgaaggatccagggttggtgtggaccccttgatcattcctacagattattggaagaaaatggccaaagttctgagaagtgccggccatcacctcattcctgtcaaggagaacctcgttgacaaaatctggacagaccgtcctgagcgcccttgcaagcctctcctcacactgggcctggattacacaggcatctcctggaaggacaaggttgcagaccttcggttgaaaatggctgagaggaacgtcatgtggtttgtggtcactgccttggatgagattgcgtggctatttaatctccgaggatcagatgtggagcacaatccagtatttttctcctacgcaatcataggactagagacgatcatgctcttcattgatggtgaccgcatagacgcccccagtgtgaaggagcacctgcttcttgacttgggtctggaagccgaatacaggatccaggtgcatccctacaagtccatcctgagcgagctcaaggccctgtgtgctgacctctccccaagggagaaggtgtgggtcagtgacaaggccagctatgctgtgagcgagaccatccccaaggaccaccgctgctgtatgccttacacccccatctgcatcgccaaagctgtgaagaattcagctgagtcagaaggcatgaggcgggctcacattaaagatgctgttgctctctgtgaactctttaactggctggagaaagaggttcccaaaggtggtgtgacagagatctcagctgctgacaaagctgaggagtttcgcaggcaacaggcagactttgtggacctgagcttcccaacaatttccagtacgggacccaacggcgccatcattcactacgcgccagtccctgagacgaataggaccttgtccctggatgaggtgtaccttattgactcgggtgctcaatacaaggatggcaccacagatgtgacgcggacaatgcattttgggacccctacagcctacgagaaggaatgcttcacatatgtcctcaagggccacatagctgtgagtgcagccgttttcccgactggaaccaaaggtcaccttcttgactcctttgcccgttcagctttatgggattcaggcctagattacttgcacgggactggacatggtgttgggtcttttttgaatgtccatgagggtccttgcggcatcagttacaaaacattctctgatgagcccttggaggcaggcatgattgtcactgatgagcccgggtactatgaagatggggcttttggaattcgcattgagaatgttgtccttgtggttcctgtgaagaccaagtataattttaataaccggggaagcctgacctttgaacctctaacattggttccaattcagaccaaaatgatagatgtggattctcttacagacaaagagtgcgactggctcaacaattaccacctgacctgcagggatgtgattgggaaggaattgcagaaacagggccgccaggaagctctcgagtggctcatcagagagacgcaacccatctccaaacagcattaataaatacctccccggttttgtttttgtaaaatgctctggaggaaggaagaaacgtggcagatccctgacatctttcccctttcctttccttcttccctacctcccctttttactttagactttaagaagaacagaaaatcttcttatcctctttgatattttattgcaaacactcagtcttttatgattttttaattgttgagaacaagccaagaataaaattgctgcaccagaaggagggtccctccaaagttgaacacttggtgaaaggaagatgccccgacttctttggccagtgatggggaatcagtgagtgctccatgatggtcatgttccaggtgctagtacatcattcatgatcaccttaatgctcatgagactatatttatgatcagtgaataaaaatgtcagaactgtgaaaaaaaaaaaaaaaaaa

SEQ ID NO: 232 - protein, 623 aa, Homo sapiens
MPPKVTSELLRQLRQAMRNSEYVTEPIQAYIIPSGDAHQSEYIAPCDCRRAFVSGFDGSAGTAIITEEHAAMWTDGRYFLQAAKQMDSNWTLMKMGLKDTPTQEDWLVSVLPEGSRVGVDPLIIPTDYWKKMAKVLRSAGHHLIPVKENLVDKIWTDRPERPCKPLLTLGLDYTGISWKDKVADLRLKMAERNVMWFVVTALDEIAWLFNLRGSDVEHNPVFFSYAIIGLETIMLFIDGDRIDAPSVKEHLLLDLGLEAEYRIQVHPYKSILSELKALCADLSPREKVWVSDKASYAVSETIPKDHRCCMPYTPICIAKAVKNSAESEGMRRAHIKDAVALCELFNWLEKEVPKGGVTEISAADKAEEFRRQQADFVDLSFPTISSTGPNGAIIHYAPVPETNRTLSLDEVYLIDSGAQYKDGTTDVTRTMHFGTPTAYEKECFTYVLKGHIAVSAAVFPTGTKGHLLDSFARSALWDSGLDYLHGTGHGVGSFLNVHEGPCGISYKTFSDEPLEAGMIVTDEPGYYEDGAFGIRIENVVLVVPVKTKYNFNNRGSLTFEPLTLVPIQTKMIDVDSLTDKECDWLNNYHLTCRDVIGKELQKQGRQEALEWLIRETQPISKQH

SEQ ID NO: 233 - DNA, 1613 bp, Homo sapiens
  CDS (324)..(1403)
gccacacaggctccttggagtaagagtgtgagaaactggatgaagacagctgtattcttttggaagcgttcgagattggtctgtctctaccaactaaaaacttctagcttaagtgcagagatttaaggagatcaacaaaaactcagtctagacatattatgaggctgggagggtatcaacagacttgagttcttgtcagcaagatcacctgcttttaatattgtcctcagggtctgagcacatctggaagtgaggtcaatcaagttagaccccaaaaacttttgtgacaacagtgaagaggggaaaataaacacaccacaaacatgaacctcaaccccccgacatctgctcttcagatcgagggcaaaggcagccatattatggctagaaatgtaagctgctttctagtcaggcacacccctcatcccagaagagtctgccacatcaaaggcttgaataacattccaatctgtactgtgaatgatgatgagaatgcatttggaacattgtgggaagttggccagtctaactacttagagaagaacaggataccatttgccaattgcagttaccccccgagcactgcagtccagaagagccctgtaagaggaatgtcgccagccccaaacggtgccaaagtgcctccacggcctcattctgagcccagtagaaaaattaaagagtgcttcaaaacttccagtgagaatcccttagtaattaaaaaggaagaaattaaggccaaaagaccaccatcacctccaaaggcatgctctactcctggctcctgttcttcagggatgacaagtaccaagaatgatgtgaaagcaaacaccatttgcataccaaactatctggatcaggaaataaaaatcctggcaaagctctgtagcattttgcatactgattctctggcagaagttttacagtggctgcttcatgcaacttcaaaagaaaaagagtgggtctcagctttgattcattctgagcttgccgagataaacctgttaactcatcacagaagaaacacctcaatggaaccagcagcagagactgggaagccacccacagttaaatcaccacccacagttaaattgcccccaaattttactgcaaaatcaaaagtgctgaccagagatacagaaggggatcaaccaaccagagtgtcaagtcaaggatctgaagaaaacaaggaagtaccaaaagaggctgagcacaagcctccactacttataagaagaaataatatgaaaatacctgttgcagaatatttcagcaaaccaaattctcctcccaggcctaacactcaggagagtggatcagcaaaaccagtgtcagcaaggagtatacaagaatacaacctctgtccccaaagagcatgttatccttcaacacaccggaggtagaagttctagactgggtgaattctttcatgaatatgagcttcacatttacatcatcaaattatttttcaaatgaatatttttggtattgaggaatcaagtggtcctctttatggtggcacatgtaaatctaaaaatacctgtatgtaatgctacaaataaatattactggaaatgatatttccatttgtagttaaaaaaaaaaaaaaaaaa

SEQ ID NO: 234 - protein, 359 aa, Homo sapiens
MNLNPPTSALQIEGKGSHIMARNVSCFLVRHTPHPRRVCHIKGLNNIPICTVNDDENAFGTLWEVGQSNYLEKNRIPFANCSYPPSTAVQKSPVRGMSPAPNGAKVPPRPHSEPSRKIKECFKTSSENPLVIKKEEIKAKRPPSPPKACSTPGSCSSGMTSTKNDVKANTICIPNYLDQEIKILAKLCSILHTDSLAEVLQWLLHATSKEKEWVSALIHSELAEINLLTHHRRNTSMEPAAETGKPPTVKSPPTVKLPPNFTAKSKVLTRDTEGDQPTRVSSQGSEENKEVPKEAEHKPPLLIRRNNMKIPVAEYFSKPNSPPRPNTQESGSAKPVSARSIQEYNLCPQRACYPSTHRR

SEQ ID NO: 235 - DNA, 1584 bp, Homo sapiens
  CDS (160)..(1434)
ggggagaggaagagtggtagggggagggagagagagaggaagagtttccaaacttgtctccagtgacaggagacatttacgttccacaagataaaactgccacttagagcccagggaagctaaaccttcctggcttggcctaggagctcgagcggagtcatgggctctctggtcctgacactgtgcgctcttttctgcctggcagcttacttggtttctggcagccccatcatgaacctagagcagtctcctctggaagaagatatgtccctctttggtgatgttttctcagagcaagacggtgtcgactttaacacactgctccagagcatgaaggatgagtttcttaagacactaaacctctctgacatccccacgcaggattcagccaaggtggacccaccagagtacatgttggaactctacaacaaatttgcaacagatcggacctccatgccctctgccaacatcattaggagtttcaagaatgaagatctgttttcccagccggtcagttttaatgggctccgaaaataccccctcctcttcaatgtgtccattcctcaccatgaagaggtcatcatggctgaacttaggctatacacactggtgcaaagggatcgtatgatatacgatggagtagaccggaaaattaccatttttgaagtgctggagagcaaaggggataatgagggagaaagaaacatgctggtcttggtgtctggggagatatatggaaccaacagtgagtgggagacttttgatgtcacagatgccatcagacgttggcaaaagtcaggctcatccacccaccagctggaggtccacattgagagcaaacacgatgaagctgaggatgccagcagtggacggctagaaatagataccagtgcccagaataagcataaccctttgctcatcgtgttttctgatgaccaaagcagtgacaaggagaggaaggaggaactgaatgaaatgatttcccatgagcaacttccagagctggacaacttgggcctggatagcttttccagtggacctggggaagaggctttgttgcagatgagatcaaacatcatctatgactccactgcccgaatcagaaggaacgccaaaggaaactactgtaagaggaccccgctctacatcgacttcaaggagattgggtgggactcctggatcatcgctccgcctggatacgaagcctatgaatgccgtggtgtttgtaactaccccctggcagagcatctcacacccacaaagcatgcaattatccaggccttggtccacctcaagaattcccagaaagcttccaaagcctgctgtgtgcccacaaagctagagcccatctccatcctctatttagacaaaggcgtcgtcacctacaagtttaaatacgaaggcatggccgtctccgaatgtggctgtagatagaagaagagtcctatggcttatttaataactgtaaatgtgtatatttggtgttcctatttaatgagattatttaataagggtgtacagtaatagaggcttgctgccttcaggaaatggacaggtcagtttgttgtaggaaatgcatatttt

SEQ ID NO: 236 - protein, 424 aa, Homo sapiens
MGSLVLTLCALFCLAAYLVSGSPIMNLEQSPLEEDMSLFGDVFSEQDGVDFNTLLQSMKDEFLKTLNLSDIPTQDSAKVDPPEYMLELYNKFATDRTSMPSANIIRSFKNEDLFSQPVSFNGLRKYPLLFNVSIPHHEEVIMAELRLYTLVQRDRMIYDGVDRKITIFEVLESKGDNEGERNMLVLVSGEIYGTNSEWETFDVTDAIRRWQKSGSSTHQLEVHIESKHDEAEDASSGRLEIDTSAQNKHNPLLIVFSDDQSSDKERKEELNEMISHEQLPELDNLGLDSFSSGPGEEALLQMRSNIIYDSTARIRRNAKGNYCKRTPLYIDFKEIGWDSWIIAPPGYEAYECRGVCNYPLAEHLTPTKHAIIQALVHLKNSQKASKACCVPTKLEPISILYLDKGVVTYKFKYEGMAVSECGCR

SEQ ID NO: 237 - DNA, 7706 bp, Homo sapiens
  CDS (872)..(6445)
ctgaggctcagccctcctcggagcccaccatctcgaggctcctggactgtaagggacccctgcagtccccagagcagaggccagcaggggctgagactatgaggcaagcagcccatcgacccaggcctccttaggaccagcccagccacccagcaagcgaaagagcagcagcagagagcagagccggagataaaggaccacagcggaccactggggatcacccccagcagctcctgaagcctctggccgggctgaggggttgcgacagacggccagacccacagacactgacagacacacaacgacaccgatgcacacagctgcacgacactgacacactcagatacaaccagggacagcatcacatactgccacagccctgcaatacagacacccacacacacacacacaaacaactggcaactctgaaatgggcagacagtgacacacagcaccacccccctcaacacacagaagtgggggcacccatcttcccaacacatgagacagcattgacctgcacggacagacctggagacacacacacgcaccctcacccaggcgcagctgtcggtggcctctgcacatcctccctacccccacagggacaccctcgctcctccacatactcgcgcacacacacagctaccagcaaacatagctcacatacccctggctccagctccagcagccctggcgccttctgcagcctcctttgtgggtggggaagagctcagccaaccttggatggagcgtcggtgaagcaagagctcagaggggagaggggctggcctggcatgaccctcgccagtccccccacctggctgggtgatgtcccccggcccgggttctggggccccttggcagtaccatggagcaactgacaaccctcccacggcctggggaccctggagccatggagccatgggcactgcccacctggcatagctggactccaggtcgagggggtgaacctagcagtgcagccccaagcatcgctgatactcctccggcagctctgcagcttcaagaactgaggtctgaggagagttccaagcccaaaggagacgggagctccaggcccgtggggggaactgaccctgaaggagcagaggcttgtctgcccagcctgggccagcaagcatccagctctggacccgcctgccagaggccagaggatgaggaagtggaggctttcctgaaggccaagctgaatatgagctttggggacaggcccaatctggagctgctgagggccctgggggagctgcggcagcgctgtgccatccttaaggaggaaaaccagatgctgaggaagagcagcttccctgagacagaagagaaggtgcggaggctgaagaggaagaacgccgagctggcggtcattgccaagcgcctggaggagagggcccgaaagctgcaggaaacgaacctgagggtggtgagtgcccccttgccccggccggggaccagcttggagttgtgtcggaaggccctagcccgccagcgagcccgggacctcagtgagacagccagtgcactgctggccaaggacaagcagattgctgccttgcagcgggagtgcagggagctgcaggccaggctcactctggtgggcaaggagggtccccagtggctccacgtgcgggacttcgatcggctgctgcgcgagtcccagcgggaggtgctgcggctgcagaggcagatcgcgctgcgcaaccagcgggagacgctcccgctcccgccgtcctggcccccgggccctgctctccaggccagagcaggggcgcctgctcccggggccccgggagaggccacgccccaggaggatgcggacaacctacccgtgattctaggggagccagagaaagagcagagggtgcagcagctggaatcggagctcagcaagaagcggaagaaatgcgagagcctggagcaggaagcccggaaaaagcagaggcgatgtgaggagctggaactgcagctgagacaagcgcagaatgagaatgcccgcctggtggaggagaactcccggctcagtgggagagccacagagaaggagcaggtggagtgggagaatgcggagctgaggggccagctcctgggggtgacacaggagagggactcagcccttcgcaagagccagggcctgcagagcaagctggagagcctggagcaagtgctgaagcacatgcgggaggtggcccagcggcggcagcagctggaggtggagcatgaacaggctcggctcagcctacgggagaagcaggaggaggtccggagactgcagcaggcccaggctgaagcccagagggaacatgaaggagccgtgcagctgctggagtctaccttggattccatgcaggcccgggttcgagagctcgaagaacagtgccgcagccaaaccgagcagttcagcctcctggcacaggaactccaggctttccgcctgcacccgggccccttggatctgctcacatctgccctggactgtgggagccttggagactgcccaccacccccctgctgctgctccattccccagccttgccgggggtctggccccaaagaccttgacctcccgccgggctcccctgggcgctgcaccccaaagtcttccgagcctgcccctgccactctcactggggtccctcgaaggacagccaagaaggcagagtctctctccaactcctcccactccgagtccatccacaacagccccaagtcatgccctacacctgaggtggacacagccagtgaggtagaggagctggaggcagacagtgtctccctgctcccagctgcgccagagggcagccggggaggagccaggatccaggtcttcctagcacgttatagctacaacccctttgagggtcccaatgagaatccagaagcagagcttccgctgacagctggcgagtacatctacatctatggcaacatggatgaggatggcttttttgaaggagagctcatggatggccgaaggggcctggtcccttccaattttgtagagcgtgtgtcggatgatgacctcctgacctccctccctccagagctggccgatttgtcccacagctcaggccctgaactcagtttcctgagtgtaggtgggggtggcagcagtagcgggggccaaagcagtgtgggaaggagccagcccagacctgaggaggaggatgcaggggacgagctcagtctgagcccatcaccggagggcctgggcgagcctcctgccgtgccttacccccgccgtctggtggtcctcaagcagctggcccacagcgtggtgctggcctgggagccgcctcctgagcaagtggagctacacggcttccatatctgtgtgaatggggagctgcgacaggccctggggcctggggcgccacccaaggccgtgctggagaacctggacctgtgggccgggccccttcacatttctgtccaggccctgactagccggggcagctctgacccactgcgctgttgcttggcggtgggtgcccgggccggagtggtgcccagccagctgcgggtccatcggttgacagccacatctgctgagatcacctgggtgcccggcaatagcaacttggcccatgccatctacctcaatggggaagagtgcccacctgccagccccagtacctactgggccaccttctgccacttacggcctggcacaccctatcaggcccaagtggaggctcagctcccaccccaagggccctgggaaccaggctgggagaggctggagcagcgggctgccaccctgcagttcaccacactcccagcaggcccacctgatgcccctctggatgtgcagatcgagcctgggccctcccctgggatcttgatcatcagttggctcccagtcaccatcgatgctgctggcacatccaacggtgtccgggtcacaggctatgccatctacgctgatgggcagaagatcatggaggtggcctcacccacggcaggcagtgtactggtggagttgtcccagctgcagctgctgcaggtgtgtcgtgaggtggtcgtgcgcaccatgtcgccccacggggagtcggcggactccatcccggctcctatcactcccgccctggctccggccagcctgccagcccgagtctcctgcccctcaccgcacccaagcccagaggccagagcgccccttgcttcagcctccccagggcctggagaccccagctctcctctccagcaccctgctccccttggaactcaagagcctccaggagcaccccctgcaagcccttccagagagatggcaaaagggtcccacgaggaccctccagcaccttgctcccaggaggaggctggggcagcagtgctgggcacctcagaggagaggacagccagcacatctaccctgggtgagaaggaccctggccccgcagctccctcactggccaagcaggaggccgagtggactgcaggagaggcctgtccggcctccagctccacccagggagcacgggcccagcaggcgccaaataccgagatgtgccaaggaggagacccagggtctgggctgaggcccagggctgagaaggaggacacagcagagcttggggttcatctggtgaactccctcgtggaccacggccgcaactcagacctgtcagacatccaggaggaagaggaagaggaggaggaggaggaggaagaggagctgggttccaggacttgctccttccagaagcaggttgctggcaacagcatcagggagaatggggccaagtcccagcccgaccccttttgtgagactgacagcgatgaggagatcttggagcagatcctggagctgcccctccagcagttctgtagcaagaagctctttagcatcccggaggaggaggaagaggaagaggaggacgaggaggaggagaagtcaggggcaggctgttcttcccgagaccctggcccgcctgaacctgcattgctggggctgggctgtgacagtggtcagccccgaagacctggccagtgtcccttgtctcctgagtcctccagggctggagactgcctggaagacatgcctggattagttggtggaagcagccggaggagaggagggggctcccctgagaagcccccaagccgcaggcggcctccagatccccgagaacactgcagccgacttctcagcaacaatgggccccaggcctctggacgactgggccccacacgggagaggggtggcctccccgtaattgagggccccaggactggactagaggctagcgggagaggccggctgggcccttcccggaggtgctcccgtggccgggcgctggagcctggcctggccagctgcctttcccccaagtgcttggaaatcagcattgaatatgattcggaggatgagcaggaggcgggcagcgggggcatcagcatcaccagctcctgctaccctggagatggggaggcctggggcacagcaactgtaggaaggcccagggggcctccgaaggccaattcaggccccaagccctacccacgcctcccagcctgggagaaaggggaaccagagcggagaggccgcagtgcgacgggcagagccaaggagccactctcccgggcaacagagaccggagaggccagagggcaggacggctctgggcggaggggcccccagaagagaggtgtccgagtcctcaggccaagcactgcagagctagtccctgcgaggagcccctcagaaacactggcttaccagcacctacccgtcaggatctttgtggctctgtttgactatgaccccgtgtcaatgtcgcccaatcctgatgctggagaagaagagcttcccttccgagagggtcagatcctgaaggtgtttggggacaaggatgccgatggcttctaccagggcgaaggtgggggccggacaggctacattccctgcaacatggtggctgaggtggctgtggacagccctgctgggagacagcaactgctccagcggggttatttgtccccagatattctccttgagggctcagggaatggtccgtttgtgtactccacagcccacacaactgggcctcctcccaagccccgccgctccaagaaagctgagtcggaaggccctgcccagccctgtccaggcccccctaagctggtcccctctgctgacctgaaagctccccactccatggtggctgcatttgactacaacccccaggagagttcccccaatatggacgtggaggcagagctgcccttccgggcaggggatgtcattactgtgtttgggggcatggacgatgacggtttctactatggggaattaaatggacaaaggggcctggttccatccaacttcctggagggccctgggcctgaggcaggcggcctggacagggaacccaggacaccccaggctgagagtcagagaacgaggaggagaagagtccagtgctagatggagatagatatatgtagagagagcaacatgactggggctgcaccacacaagggtccccagggcccccaggtgggccttgtacccccagctctggcagcgcccccaggattgaacgtggggagccccagggcagaagcgagaaggtgtggggtttcttctccaaggggaagcagctcctcaggaggctgggctctgggaagaaggagtgaagctgtggcccatcctgcaggcagaagaggccctgagaggcccccagatcactgtctctgctgagcagggaaggctcagactgggcccagagcccccgttcttctgcgttaacactgtggcattcagagggaatcaaagagccttggtgaaggtcagagctaaatggctccttaaggatgaactctctagagaagcaccttcctcctacaggaggggaaactgagcccacagtgagtatgtaacttgaccaaggtcactgagccaggactggacccaggaccctcgcgtcctggtccacccacctcgtctactagtgtcccacagtgctgcgctagtcccttctgccacccttcccagtcccaggacgggccctggagggagaaaggagcctgtgccccctgatggctctggctgtcctgatcctgtcttccctcccctgaaggaaagtttgcactggattttattggagccccatctccccagcgggcaggcgggcggagcctgtatatatgtatatactcagtgcctcagttcagcttcctccacctcgcttccactgcacaggcccaggaaggagaaaggccaagccaaagtgggccccaccctgcccccgtcgtgctccatccttccctgccggggcctgctggcccctgtaaggtcccgcccccaaagaccctggggccagcggggccgaaagcggagttgggtttgccttattttgctcattggattcaagttcttttgcatagttttcttctaacccctgttggagtccaggggctggagaaaaggacagatttatgcagctattttcatacattccctgttcagagtggggtaggggttctccgccgttacccgatccactccatcccccaccctctgaggggtgagtgtgtctttgcatgtttcctttgctgtggtgggagatagtttgactgaacccccaccttgaccttggtctccaggggtgtggaatggtgggggaatttgtttaaaaagacattttattataataaagtctattttcacaaaaaaaaaaaaaaaa

SEQ ID NO: 238 - protein, 1857 aa, Homo sapiens
MEQLTTLPRPGDPGAMEPWALPTWHSWTPGRGGEPSSAAPSIADTPPAALQLQELRSEESSKPKGDGSSRPVGGTDPEGAEACLPSLGQQASSSGPACQRPEDEEVEAFLKAKLNMSFGDRPNLELLRALGELRQRCAILKEENQMLRKSSFPETEEKVRRLKRKNAELAVIAKRLEERARKLQETNLRVVSAPLPRPGTSLELCRKALARQRARDLSETASALLAKDKQIAALQRECRELQARLTLVGKEGPQWLHVRDFDRLLRESQREVLRLQRQIALRNQRETLPLPPSWPPGPALQARAGAPAPGAPGEATPQEDADNLPVILGEPEKEQRVQQLESELSKKRKKCESLEQEARKKQRRCEELELQLRQAQNENARLVEENSRLSGRATEKEQVEWENAELRGQLLGVTQERDSALRKSQGLQSKLESLEQVLKHMREVAQRRQQLEVEHEQARLSLREKQEEVRRLQQAQAEAQREHEGAVQLLESTLDSMQARVRELEEQCRSQTEQFSLLAQELQAFRLHPGPLDLLTSALDCGSLGDCPPPPCCCSIPQPCRGSGPKDLDLPPGSPGRCTPKSSEPAPATLTGVPRRTAKKAESLSNSSHSESIHNSPKSCPTPEVDTASEVEELEADSVSLLPAAPEGSRGGARIQVFLARYSYNPFEGPNENPEAELPLTAGEYIYIYGNMDEDGFFEGELMDGRRGLVPSNFVERVSDDDLLTSLPPELADLSHSSGPELSFLSVGGGGSSSGGQSSVGRSQPRPEEEDAGDELSLSPSPEGLGEPPAVPYPRRLVVLKQLAHSVVLAWEPPPEQVELHGFHICVNGELRQALGPGAPPKAVLENLDLWAGPLHISVQALTSRGSSDPLRCCLAVGARAGVVPSQLRVHRLTATSAEITWVPGNSNLAHAIYLNGEECPPASPSTYWATFCHLRPGTPYQAQVEAQLPPQGPWEPGWERLEQRAATLQFTTLPAGPPDAPLDVQIEPGPSPGILIISWLPVTIDAAGTSNGVRVTGYAIYADGQKIMEVASPTAGSVLVELSQLQLLQVCREVVVRTMSPHGESADSIPAPITPALAPASLPARVSCPSPHPSPEARAPLASASPGPGDPSSPLQHPAPLGTQEPPGAPPASPSREMAKGSHEDPPAPCSQEEAGAAVLGTSEERTASTSTLGEKDPGPAAPSLAKQEAEWTAGEACPASSSTQGARAQQAPNTEMCQGGDPGSGLRPRAEKEDTAELGVHLVNSLVDHGRNSDLSDIQEEEEEEEEEEEEELGSRTCSFQKQVAGNSIRENGAKSQPDPFCETDSDEEILEQILELPLQQFCSKKLFSIPEEEEEEEEDEEEEKSGAGCSSRDPGPPEPALLGLGCDSGQPRRPGQCPLSPESSRAGDCLEDMPGLVGGSSRRRGGGSPEKPPSRRRPPDPREHCSRLLSNNGPQASGRLGPTRERGGLPVIEGPRTGLEASGRGRLGPSRRCSRGRALEPGLASCLSPKCLEISIEYDSEDEQEAGSGGISITSSCYPGDGEAWGTATVGRPRGPPKANSGPKPYPRLPAWEKGEPERRGRSATGRAKEPLSRATETGEARGQDGSGRRGPQKRGVRVLRPSTAELVPARSPSETLAYQHLPVRIFVALFDYDPVSMSPNPDAGEEELPFREGQILKVFGDKDADGFYQGEGGGRTGYIPCNMVAEVAVDSPAGRQQLLQRGYLSPDILLEGSGNGPFVYSTAHTTGPPPKPRRSKKAESEGPAQPCPGPPKLVPSADLKAPHSMVAAFDYNPQESSPNMDVEAELPFRAGDVITVFGGMDDDGFYYGELNGQRGLVPSNFLEGPGPEAGGLDREPRTPQAESQRTRRRRVQC

SEQ ID NO: 239 - DNA, 2447 bp, Homo sapiens
  CDS (889)..(1521)
ctactcatggcgcctgccctggttggcgatgtgttaccaacgtctggcctgtcccagcccaaggctccgcgtggcgaccaggcccagcactgggaggctgtgcagagcgtggcgtttactgcttattgctactctgcagaggttggcaacatctgacccgctctactggcaggaaacaggctcgggggcattgggaaaacgatcaaggccacttggctggacactggcggagcctcgcactcaaacctgtcgggcctcaactccgtgccaggccaacaagttgccctgggcagttcaagctggggataagggggatggggagcaggaagacagcagcaaggatgcgatcccgaaggaactttcctcctcagactgctccatgtccatgtggggcaggtcgctgaagagttcgaaaccgtgctcagcaccgcgtttggggcatgtgagaccgagaggctttgggaaactgacgccgctgtgagaacgagtttagcggagtctatggacgctgcgagcttgtggccacaagagggcgccccggagcacggcccagtccccgcccccgctggatggggcccggcctcttcccagcgttcctcctccggccccaggtcaccgccagcacgcgcctgcttcccgtctgcgcgagtccacgcagctccccagatcaagaagctgaggccccaggttacacactaaagtaaatggcagaggcagaaataacacctatgtcctcctgaccccaaggcatgttcttaaagttctggaaacctcctggaggcttccttgctgctcctctgggactgccaccctgggcagggtgttctgtggcccctcatcatcgtggttttgaaccacaggcccttcaccagcacagcagcagcaggcatggcagcaagcgtggagcagcgcgagggcaccatccaggtgcagggccaggccctcttcttccgagaggccctgcccggcagtgggcaggctcgcttctctgtactgctgctgcatggtattcgcttctcctccgagacctggcagaacctgggtacactgcacaggctggcccaggctggctaccgggctgtggccattgacctgccaggtctggggcactccaaggaagcagcagcccctgcccctattggggagctggcccctggcagcttcctggcggctgtggtggatgccttggagctgggccccccggttgtgatcagtccatcactgagtggcatgtactccctgcccttcctcacggcccctggctcccagctcccgggctttgtgccagtggcccccatctgcactgacaaaatcaatgctgccaactatgccagtgtgaagactccagctctgattgtatatggagaccaggaccccatgggtcagaccagctttgagcacctgaagcagctgcccaaccaccgggtgctgatcatgaagggggcggggcacccctgttacctggacaaaccagaggagtggcatacagggctgctggacttcctgcaggggctccagtgaagcccagcactgctgcagggggtgggctgcctgcctgctctgagctctctcttgcacgctctctcttctctcccaggctctggctcatgcacatgcaacaggtgcgtctgtctatatgtctgggttcttgtcttttgtggtctgtttgtcttttctacctctttctcttgcagtgatagactgagggggtaaaatcaagagaaaaaactctcaggaatcaaggaacataatcctgtggagggtaatccattacatgagcttctcctgttcttccactttcctgcctggctttcactccttcccctgctctgcccagcctttccctcccacccactcctccttctgcaaatgccctgaaggccagcccttaccccaacacccacttccccacctccttaggccccagatacatacatgcccacatgcacgcttacatgtttagagccatccttgtttccaaatatgacccttcgcttgagggcaactgcataggtacatctaactctggactggcatgcacattgtcatgtgcagctttgcatatacacacatgcatacatgagcctccacacaagcacttgcacacatgtggactcctaaccatgctaacctcactggctgggaaggtggggaccccatgggccagcccttgcaggaggcccttttgcaaggcttagggtgtggccagccctgaaagctacttggacacaggtttcagctggccccagcccagaagtgacccccagaaagggagggccaccgctttgccccctgcttttacccttccttctgggtgctctacacctcaggttaccaggcctgaggcatctcagccaagcttgtttcctgctctgaggcttgtggggtgggagccagagtggaggtcggtgaaataaagtgatgcaattagaccccaaaaaaaaaaa

SEQ ID NO: 240 - protein, 210 aa, Homo sapiens
MAASVEQREGTIQVQGQALFFREALPGSGQARFSVLLLHGIRFSSETWQNLGTLHRLAQAGYRAVAIDLPGLGHSKEAAAPAPIGELAPGSFLAAVVDALELGPPVVISPSLSGMYSLPFLTAPGSQLPGFVPVAPICTDKINAANYASVKTPALIVYGDQDPMGQTSFEHLKQLPNHRVLIMKGAGHPCYLDKPEEWHTGLLDFLQGLQ

SEQ ID NO: 241 - DNA, 3606 bp, Homo sapiens
  CDS (211)..(3015)
aacatttattttgacaaccctctaggtgttgctaggcttctgggatatgacagcattgccttgtgttagctagcaataagaaaagaagctttgtttggattaacatatataccctcttcattctgcatacctattttttccccaataatttgcagcttaggtccgaggacaccacaaactctgcttaaagggcctggaggctctcaaggcatggccagacgctctgtcttgtacttcatcctgctgaatgctctgatcaacaagggccaagcctgcttctgtgatcactatgcatggactcagtggaccagctgctcaaaaacttgcaattctggaacccagagcagacacagacaaatagtagtagataagtactaccaggaaaacttttgtgaacagatttgcagcaagcaggagactagagaatgtaactggcaaagatgccccatcaactgcctcctgggagattttggaccatggtcagactgtgacccttgtattgaaaaacagtctaaagttagatctgtcttgcgtcccagtcagtttgggggacagccatgcactgcgcctctggtagcctttcaaccatgcattccatctaagctctgcaaaattgaagaggctgactgcaagaataaatttcgctgtgacagtggccgctgcattgccagaaagttagaatgcaatggagaaaatgactgtggagacaattcagatgaaagggactgtgggaggacaaaggcagtatgcacacggaagtataatcccatccctagtgtacagttgatgggcaatgggtttcattttctggcaggagagcccagaggagaagtccttgataactctttcactggaggaatatgtaaaactgtcaaaagcagtaggacaagtaatccataccgtgttccggccaatctggaaaatgtcggctttgaggtacaaactgcagaagatgacttgaaaacagatttctacaaggatttaacttctcttggacacaatgaaaatcaacaaggctcattctcaagtcagggggggagctctttcagtgtaccaattttttattcctcaaagagaagtgaaaatatcaaccataattctgccttcaaacaagccattcaagcctctcacaaaaaggattctagttttattaggatccataaagtgatgaaagtcttaaacttcacaacgaaagctaaagatctgcacctttctgatgtctttttgaaagcacttaaccatctgcctctagaatacaactctgctttgtacagccgaatattcgatgactttgggactcattacttcacctctggctccctgggaggcgtgtatgaccttctctatcagtttagcagtgaggaactaaagaactcaggtttaaccgaggaagaagccaaacactgtgtcaggattgaaacaaagaaacgcgttttatttgctaagaaaacaaaagtggaacataggtgcaccaccaacaagctgtcagagaaacatgaaggttcatttatacagggagcagagaaatccatatccctgattcgaggtggaaggagtgaatatggagcagctttggcatgggagaaagggagctctggtctggaggagaagacattttctgagtggttagaatcagtgaaggaaaatcctgctgtgattgactttgagcttgcccccatcgtggacttggtaagaaacatcccctgtgcagtgacaaaacggaacaacctcaggaaagctttgcaagagtatgcagccaagttcgatccttgccagtgtgctccatgccctaataatggccgacccaccctctcagggactgaatgtctgtgtgtgtgtcagagtggcacctatggtgagaactgtgagaaacagtctccagattataaatccaatgcagtagacggacagtggggttgttggtcttcctggagtacctgtgatgctacttataagagatcgagaacccgagaatgcaataatcctgccccccaacgaggagggaaacgctgtgagggggagaagcgacaagaggaagactgcacattttcaatcatggaaaacaatggacaaccatgtatcaatgatgatgaagaaatgaaagaggtcgatcttcctgagatagaagcagattccgggtgtcctcagccagttcctccagaaaatggatttatccggaatgaaaagcaactatacttggttggagaagatgttgaaatttcatgccttactggctttgaaactgttggataccagtacttcagatgcttaccagacgggacctggagacaaggggatgtggaatgccaacggacggagtgcatcaagccagttgtgcaggaagtcctgacaattacaccatttcagagattgtatagaattggtgaatccattgagctaacttgccccaaaggctttgttgttgctgggccatcaaggtacacatgccaggggaattcctggacaccacccatttcaaactctctcacctgtgaaaaagatactctaacaaaattaaaaggccattgtcagctgggacagaaacaatcaggatctgaatgcatttgtatgtctccagaagaagactgtagccatcattcagaagatctctgtgtgtttgacacagactccaacgattactttacttcacccgcttgtaagtttttggctgagaaatgtttaaataatcagcaactccattttctacatattggttcctgccaagacggccgccagttagaatggggtcttgaaaggacaagactttcatccaacagcacaaagaaagaatcctgtggctatgacacctgctatgactgggaaaaatgttcagcctccacttccaaatgtgtctgcctattgcccccacagtgcttcaagggtggaaaccaactctactgtgtcaaaatgggatcatcaacaagtgagaaaacattgaacatctgtgaagtgggaactataagatgtgcaaacaggaagatggaaatactgcatcctggaaagtgtttggcctagcacaattactgctaggcccagcacaatgaacagatttaccatcccgaagaaccaactcctacaaatgagaattcttgcacaaacagcagactggcatgctcaaagttactgacaaaaattattttctgttagtttgagatcattattctcccctgactctcctgtttgggcatgtcttattcagttccagctcatgacgccctgtagcatacccctaggtaccaacttccacagcagtctcgtaaattctcctgttcacattgtacaaaaataatgtgacttctgaggcccttatgtagcctgtgacattaagcattctcgcaattagaaataagaataaaacccataattttcttcaatgagttaataaacagaaatctccagaacctctgaaacacattcttgaagcccagctttcatatcttcattcaacaaataatttctgagtgtgtatacaggatgtcaagtactgaccaaagtcctgagaactcggcagataataaaacagacaaaagcctttgccttcatgaagcatacattcattcaggggtagacacacaaaaaatgaaataaacaggtaaaatatgtagc

SEQ ID NO: 242 - protein, 934 aa, Homo sapiens
MARRSVLYFILLNALINKGQACFCDHYAWTQWTSCSKTCNSGTQSRHRQIVVDKYYQENFCEQICSKQETRECNWQRCPINCLLGDFGPWSDCDPCIEKQSKVRSVLRPSQFGGQPCTAPLVAFQPCIPSKLCKIEEADCKNKFRCDSGRCIARKLECNGENDCGDNSDERDCGRTKAVCTRKYNPIPSVQLMGNGFHFLAGEPRGEVLDNSFTGGICKTVKSSRTSNPYRVPANLENVGFEVQTAEDDLKTDFYKDLTSLGHNENQQGSFSSQGGSSFSVPIFYSSKRSENINHNSAFKQAIQASHKKDSSFIRIHKVMKVLNFTTKAKDLHLSDVFLKALNHLPLEYNSALYSRIFDDFGTHYFTSGSLGGVYDLLYQFSSEELKNSGLTEEEAKHCVRIETKKRVLFAKKTKVEHRCTTNKLSEKHEGSFIQGAEKSISLIRGGRSEYGAALAWEKGSSGLEEKTFSEWLESVKENPAVIDFELAPIVDLVRNIPCAVTKRNNLRKALQEYAAKFDPCQCAPCPNNGRPTLSGTECLCVCQSGTYGENCEKQSPDYKSNAVDGQWGCWSSWSTCDATYKRSRTRECNNPAPQRGGKRCEGEKRQEEDCTFSIMENNGQPCINDDEEMKEVDLPEIEADSGCPQPVPPENGFIRNEKQLYLVGEDVEISCLTGFETVGYQYFRCLPDGTWRQGDVECQRTECIKPVVQEVLTITPFQRLYRIGESIELTCPKGFVVAGPSRYTCQGNSWTPPISNSLTCEKDTLTKLKGHCQLGQKQSGSECICMSPEEDCSHHSEDLCVFDTDSNDYFTSPACKFLAEKCLNNQQLHFLHIGSCQDGRQLEWGLERTRLSSNSTKKESCGYDTCYDWEKCSASTSKCVCLLPPQCFKGGNQLYCVKMGSSTSEKTLNICEVGTIRCANRKMEILHPGKCLA

SEQ ID NO: 243 - DNA, 222 bp, Homo sapiens
  CDS (1)..(222)
atgaggattgctgtcctcttcttcaccattttcttctttatgagccaagttctaccagccaagggcaaattcaaggagatctgtgaacgtccaaatggctcctgtcgggacttttgcctcgaaacagaaatccatgtagggagatgtttaaatagccgaccctgctgcctgcctctggggcatcaaccaagaattgagagcactacacccaaaaaggactga

SEQ ID NO: 244 - protein, 73 aa, Homo sapiens
MRIAVLFFTIFFFMSQVLPAKGKFKEICERPNGSCRDFCLETEIHVGRCLNSRPCCLPLGHQPRIESTTPKKD

SEQ ID NO: 245 - DNA, 1130 bp, Homo sapiens
  CDS (1)..(483)
atggttctacttggttgcatgtgggtcacaaaggatggcgccggagaaaggagcacccggcagcaccagccctgtccccattctacaacgcctcctacccctgtccccgccgtccgggccagggagagggcactgagggcaggacccaaaggaagcacctggttgggccgggccgggaagcgaaggcccactcctcggctccggggaggcggccaccacggcttcgctagccgcgtcccgagccacgccagctgcagccagctgtgcgcggcttgttcgggcctgagctggcgctacgaagttccggtccaggtctctgacttcgggcttgttcgctggtggcgtcggagccgagccggactggtcaggatgatcacggacgtgcagctcgccatcttcgccaacatgctgggcgtgtcgctcttcttgcttgtcgttctctatcactacgtggccgtcaacaatcccaagaagcaggaatgaaagtggcgctttctccgccccagggttccaggacatagtctgaggcaagatggagggtatgaggggccttcacacttcacttcatcccttctacccatcacaacatacaaagcaactacacctggatttttccaaacaacttttatttcctcagagtcttccttaatcctatggaacaagaagctgccactgaatagggcccagtataggggcttgcttttctactccctccccccaatataaaaatatagacttttttttgtggtcccaaaatcttgtgctgcggagggagggaaggggtggcaggtccctgttttgttctgtctcaaggtgatactctgtaatgccttggacagcgtggctggcattccaaggacttaacggctgtcacatggaatcagcggcctggaggggaactagcatatttcccactgttaccccatcttggggctatatcctgggcttgaacataaaggcattatcagacccggggagaaacagtcagtgggggagatttagggacaaaacaaacctcaggttggcccaagggacccctgctgtaacaattccaggatggggagtcagatagactacaggatataggagaaaaggcaggggcagagcggggccgtgggggcctggcctga

SEQ ID NO: 246 - protein, 160 aa, Homo sapiens
MVLLGCMWVTKDGAGERSTRQHQPCPHSTTPPTPVPAVRARERALRAGPKGSTWLGRAGKRRPTPRLRGGGHHGFASRVPSHASCSQLCAACSGLSWRYEVPVQVSDFGLVRWWRRSRAGLVRMITDVQLAIFANMLGVSLFLLVVLYHYVAVNNPKKQE

SEQ ID NO: 247 - DNA, 2309 bp, Homo sapiens
  CDS (145)..(735)
aatcgctccggagcttctggagggggcagatgcaggtgccggctgctgcagtgcagtagctgctggaggctggggaggcccggacccggtgcaggaagacgccgaccacgcgggctcctgatcgcgggcgcccacagcgcggacatggcgggctggtggccggcgttgtcgcgcgcggcccggcgccacccgtggcccaccaacgtgctgctttacggctcgctcgtctcggccggggacgcgctgcaacagcggctgcagggccgcgaggccaactggcgccagacgcggcgcgtggccacgttggtggtgaccttccacgccaacttcaactacgtgtggctgcgcctgctggagcgcgcgctcccgggccgagcgccgcacgccctgctggccaagttgctgtgcgaccaggtggtcggtgcgcccatcgcggtctcggccttctatgtcggtatgagcattctccaaggaaaggatgacatatttttggacctgaaacagaaattctggaatacctatctgagtggactgatgtactggccctttgtacagctgaccaacttcagccttgttcctgttcaatggagaacagcttacgctggagtctgtggttttctctgggccaccttcatctgtttttcccagcagagtggtgacggcacattcaagtcagctttcaccattttatatacaaaggggaccagtgccacagaagggtacccgaagaaatgagaagtcaaggactctcttaaagggaccacattttttacctaaaatgcacagaattgcctgcagacaaaatatttgatgtgccaattatgcacttcattttgaggaattactactatttatagacccactttttaaaaaattatcaatgattatttttgaattgtattcagacttttttcctgttctagtctgaaatattacttctctaatattttggttaatatgaataatagtggcaaaatggcattttagaattattaatatttctaatattttaacacaagtttcaggaaacttggttttgattgttcacatttctattctaaaatctcaggttatctcctgaacacttttgggcagatgaagttttataccaaaaaatagttcttagagtgaattttaatttacatagaactcaatcgaaatgaagatttaataaccagatttctttctccaaaacatacacaatttgttattttagtaaatacctttttttttttttttttttttgtggtggagtcttgctgtctccccggctggagcgcagtggcacgatcgcggctcactgcagcctccatcctctgggttcaagcaattctcctgcctcaggctcctgagtagctgggattacaggcacgtgacaccaggcccagctgatttttgtatttttgttcatttgcttttgtttttgacacagagtctcgctctgtcgcccaggctggaatgcagttgtgagatctcggctcactgcaagctccgcctcccgggttcacgccattctgcgtcagcctcccaagtagctgggactacaggcacctgccacgatgcctagctaattttttgtatttttagtagagatgaagtttcaccgtgttggccaggatggtcttgatctcctgaccgcataatccacccacctcggcctcccaaagtgctgggattacaggcgtgagccaccacaaccgacttttttttttttttttttttgagacagagactcgctctgtcacccaggctggagtgcagtggcatgatttcggctcactgcaacctctgtctcctgggttcaaacgatcctactgcctcatccttcggagtagctgggattacaggcaggtgccaccatgcctggctcatttttgtatttttagtagagagggcgttttgccatgttggctaggctggtctctgtccgtcctctgagctcaagctaagccatcatatcccagtgacctgcacatatacatccagatggcctgaagttactgaagatccacagaagtgaaaatagccttaactgatgacattgcaccattgtgatatgttactgccccaccctaactgatcaatgtactttgtaatcctcccacccttaagaaggttctttttaattctccccacccttgagaatgtactttgtgagatccacccctgcccgcaaaacattgctccaaactccaccacctatccccaaacctgtaagaactaatgataatccaccaccctttgctgactccttttttggactcagcccgcctgcactcaggtgaaataaacagccatgttgctcatac

SEQ ID NO: 248 - protein, 196 aa, Homo sapiens
MAGWWPALSRAARRHPWPTNVLLYGSLVSAGDALQQRLQGREANWRQTRRVATLVVTFHANFNYVWLRLLERALPGRAPHALLAKLLCDQVVGAPIAVSAFYVGMSILQGKDDIFLDLKQKFWNTYLSGLMYWPFVQLTNFSLVPVQWRTAYAGVCGFLWATFICFSQQSGDGTFKSAFTILYTKGTSATEGYPKK

SEQ ID NO: 249 - DNA, 1574 bp, Homo sapiens
  CDS (60)..(611)
acttccggcgcactgatcccgcctggggccggctgagtggcacttaagcgggccatgccatgcaaccttgggcgctgccaaccgtgggcgagctctgggtgtgcgggcggcctggcgcggcgctccgatggagtctagttctgtcgcccaggctggagcccagtggtgtgatctcagctcactgcaatctccacctcctggcttcaagcgattcttctgcttcagcctcccgactgtgtcagcgtgttatgatgccgtcccgtaccaacctggctactggaatccccagtagtaaagtgaaatattcaaggctctccagcacagacgatggctacattgaccttcagtttaagaaaacccctcctaagatcccttataaggccatcgcacttgccactgtgctgtttttgattggcgcctttctcattattataggctccctcctgctgtcaggctacatcagcaaagggggggcagaccgggccgttccagtgctgatcattggcattctggtgttcctacccggattttaccacctgcgcatcgcttactatgcatccaaaggctaccgtggttactcctatgatgacattccagactttgatgactagcacccaccccatagctgaggaggagtcacagtggaactgtcccagctttaagatatctagcagaaactatagctgaggactaaggaattctgcagcttgcagatgtttaagaaaataatggccagattttttgggtccttcccaaagatgttaagtgaacctacagttagctaattaggacaagctctatttttcatccctgggccctgacaagtttttccacaggaatatgtatcatggaagaatagaggttattctgtaatggaaaagtgttgcctgccaccaccctctgtagagctgagcatttcttttaaatagtcttcattgccaatttgttcttgtagcaaatggaacaatgtggtatggctaatttcttattattaagtaatttattttaaaaatatctgagtatattatcctgtacacttatccctaccttcatgttccagtggaagaccttagtaaaatcaaagatcagtgagttcatctgtaatattttttttacttgctttcttactgacagcaaccaggaatttttttatcctgcagagcaagttttcaaaatgtaaatacttcctctgtttaacagtccttggaccattctgatccagttcaccagtaggttggacagcatataatttgcatcattttgtcccttgtaaatcaagatgttctgcagattattcctttaacggccggacttttggctgtttcctaatgaaacatgtagtggttattatttagagtttatagccgtattgctagcaccttgtagtatgtcatcattctgctcatgattccaaggatcagcctggatgcctagaggactagatcaccttagtttgattctattttttagcttgcaaaaagtgacttatattccaaagaaattaaaatgttgaaatccaaatcctagaaataaaatgagttaacttcaaacatttcagaaaacaaaaaaaaaaa

SEQ ID NO: 250 - protein, 183 aa, Homo sapiens
MQPWALPTVGELWVCGRPGAALRWSLVLSPRLEPSGVISAHCNLHLLASSDSSASASRLCQRVMMPSRTNLATGIPSSKVKYSRLSSTDDGYIDLQFKKTPPKIPYKAIALATVLFLIGAFLIIIGSLLLSGYISKGGADRAVPVLIIGILVFLPGFYHLRIAYYASKGYRGYSYDDIPDFDD

SEQ ID NO: 251 - DNA, 4846 bp, Homo sapiens
  CDS (144)..(2513)
atcttggattccgcggtagcggaggcggcggtcaggcgccgcttctggggagtggcctttcttttcccctccctcccggttcggtggcggcggctcctcccactgggggggggggtggcgcggcggcggtggcatctgcggccatggcggcgactactgccaaccccgaaatgacatcagatgtaccatcactgggtccagccattgcctctggaaactctggacctggaattcaaggtggaggagccattgtccagagggctattaagcggcgaccagggctggattttgatgatgatggagaagggaacagtaaatttttgaggtgtgatgatgatcagatgtctaacgataaggagcggtttgccaggtcggatgatgagcagagctctgcggataaagagagacttgccagggaaaatcacagtgaaattgaacggcggcgacggaacaagatgacagcctacatcacagaactgtcagatatggtacccacctgtagtgccctggctcgaaaaccagacaagctaaccatcttacgcatggcagtttctcacatgaagtccttgcggggaactggcaacacatccactgatggctcctataagccgtctttcctcactgatcaggaactgaaacatttgatcttggaggcagcagatggctttctgtttattgtctcatgtgagacaggcagggtggtgtatgtgtctgactccgtgactcctgttttgaaccagccacagtctgaatggtttggcagcacactctatgatcaggtgcacccagatgatgtggataaacttcgtgagcagctttccacttcagaaaatgccctgacagggcgtatcctggatctaaagactggaacagtgaaaaaggaaggtcagcagtcttccatgagaatgtgtatgggctcaaggagatcgtttatttgccgaatgaggtgtggcagtagctctgtggacccagtttctgtgaataggctgagctttgtgaggaacagatgcaggaatggacttggctctgtaaaggatggggaacctcacttcgtggtggtccactgcacaggctacatcaaggcctggcccccagcaggtgtttccctcccagatgatgacccagaggctggccagggaagcaagttttgcctagtggccattggcagattgcaggtaactagttctcccaactgtacagacatgagtaatgtttgtcaaccaacagagttcatctcccgacacaacattgagggtatcttcacttttgtggatcaccgctgtgtggctactgttggctaccagccacaggaactcttaggaaagaatattgtagaattctgtcatcctgaagaccagcagcttctaagagacagcttccaacaggtagtgaaattaaaaggccaagtgctgtctgtcatgttccggttccggtctaagaaccaagaatggctctggatgagaaccagctcctttactttccagaacccttactcagatgaaattgagtacatcatctgtaccaacaccaatgtgaagaactctagccaagaaccacggcctacactctccaacacaatccagaggccacaactaggtcccacagctaatttacccctggagatgggctcaggacagctggcacccaggcagcagcaacagcaaacagaattggacatggtaccaggaagagatggactggccagctacaatcattcccaggtggttcagcctgtgacaaccacaggaccagaacacagcaagccccttgagaagtcagatggtttatttgcccaggatagagatccaagattttcagaaatctatcacaacatcaatgcggatcagagtaaaggcatctcctccagcactgtccctgccacccaacagctattctcccagggcaacacattccctcctaccccccggccggcagagaatttcaggaatagtggcctagcccctcctgtaaccattgtccagccatcagcttctgcaggacagatgttggcccagatttcccgccactccaaccccacccaaggagcaaccccaacttggacccctactacccgctcaggcttttctgcccagcaggtggctacccaggctactgctaagactcgtacttcccagtttggtgtgggcagctttcagactccatcctccttcagctccatgtccctccctggtgccccaactgcatcgcctggtgctgctgcctaccctagtctcaccaatcgtggatctaactttgctcctgagactggacagactgcaggacaattccagacacggacagcagagggtgtgggtgtctggccacagtggcagggccagcagcctcatcatcgttcaagttctagtgagcaacatgttcaacaaccgccagcacagcaacctggccagcctgaggtcttccaggagatgctgtccatgctgggagatcagagcaacagctacaacaatgaagaattccctgatctaactatgtttccccccttttcagaatagaactattggggtgaggataaggggtgggggagaaaaaatcactgtttgtttttaaaaagcaaatctttctgtaaacagaataaaagttcctctcccttcccttccctcacccctgacatgtaccccctttcccttctggctgttcccctgctctgttgcctctctaaggtaacatttatagaagaaatggaatgaatctccaaggcttttaggactgtctgaaaatttgaggctgggtgaagttaaaacacctttccttatgtctcctgacctgaaattgtatagtgttgatttgtgctgagatcaagaggcaggttagaagaacctgacatccactgtttgccttggatagtatggcttgtttttggaaagaaattctgaagagagtggaggagaggagaaatgtcctcatatttgaggaccatgaaacattgtaggtatatatggggctttagcaagtttgagcataggctctttttgctgcctgtgagcagtccctctggaaagaaacatgtgagtaagtgagagagagtgtgtgtgtatgtgtgtgtgtgtgtgtgtgcgcacacatgcttctgtatttcactctttctccctattagggagttatgcaaaatttgtccccgattttacctttgtctttctgtgtacttttcaaagagtcctaaggagttaaatcttccaggtattttccacttagtattgcagccaaagaatatttaaataaacgtctttgctgcgcttgcatccatgcccagccaatatacaactgtaaagcaaatatagaaagtcggctgttgatacgattgtctgttatcgaacacattcagtgataaagctgggttactgctgcttttggtgctctcaccttatctggaagatctgcaaacattacctaaataggctggcaagataaacactttctggaacccgagacttggccataaagataatgctgcatttttctgtcagaatcacatatgatgtgtgttctgtagaggttatttctgcatggaaactcaacttcttggattagccgtcccagtgaaaatcctcattgttggagtgtaaaccaaatacgaagccctcttgcaaagtagcctctttcatcccatactcaaaatacccagtttagcaagcaactgagatttaagtctctctggccctaagaggtttttcctctttgctccctccaatcttgagattgggttttgctttagagtgcaagtatcataattccgtatgatagatggggcctggacacccatctcaacagggtcacttggtaattaacaatagccatataaatgcggatacaggttactaccctcaccctttaccttcctcaggtaacagtcgtagataccagcttttttttttttttttttaaattggctttggccagtagctaaagtgcaagactgaattaatgagaagatatattaaatgtagtcataggggactgaggagcaagggtggccttgaagaggccaaaggaatgtccatttgctgagtttcccttccttatgtctccagtctggtgccaggtagtggagtaaaaaaggagacagtttatttttttattctatgtgcacacttacagtatacatatatatttatatcacaatttacgaaaccaaaaagttgagtttccaatggaacccttgttttttaataatcgactttttaaatgtgatcaggactataatattgtacagttattatagggcttttggggaaggggaggatagcgagaagatgctctgggggttttgtttttgcttttccttcagggttttatttttgactgttttgttttcttgttggccatttctgtattgctggcatctgtgctaagctttacagtggcaaaaataatgacatgtagcaaagattttcaaacaaaatattttttccttttgtaaaatttcttgtgttgtgtgatcttgattgcggctttatcattcctttccagttcataaacaacaggcacccacaaccagaggaatctatagtttaagctccagacatacaaacataaggcacattgtgtctttaatttcaggaatcagaaatcatagggttctgatcacattgcacgcctcccccctcacttgtcctcctgatcctgacacattctgagtaacatcagcaggaatgctctgaccatgaggtgggggttttggggtgggcgttgcctgggttcttgggagagaggggaagagtcgggacttgaaaaccactagggcacatctggatgccttcccccagtatgtccttttctggattaaaatgagtgaaatttaaactgaaaaaaaaaaaaaaaaaaaaaa

SEQ ID NO: 252 - protein, 789 aa, Homo sapiens
MAATTANPEMTSDVPSLGPAIASGNSGPGIQGGGAIVQRAIKRRPGLDFDDDGEGNSKFLRCDDDQMSNDKERFARSDDEQSSADKERLARENHSEIERRRRNKMTAYITELSDMVPTCSALARKPDKLTILRMAVSHMKSLRGTGNTSTDGSYKPSFLTDQELKHLILEAADGFLFIVSCETGRVVYVSDSVTPVLNQPQSEWFGSTLYDQVHPDDVDKLREQLSTSENALTGRILDLKTGTVKKEGQQSSMRMCMGSRRSFICRMRCGSSSVDPVSVNRLSFVRNRCRNGLGSVKDGEPHFVVVHCTGYIKAWPPAGVSLPDDDPEAGQGSKFCLVAIGRLQVTSSPNCTDMSNVCQPTEFISRHNIEGIFTFVDHRCVATVGYQPQELLGKNIVEFCHPEDQQLLRDSFQQVVKLKGQVLSVMFRFRSKNQEWLWMRTSSFTFQNPYSDEIEYIICTNTNVKNSSQEPRPTLSNTIQRPQLGPTANLPLEMGSGQLAPRQQQQQTELDMVPGRDGLASYNHSQVVQPVTTTGPEHSKPLEKSDGLFAQDRDPRFSEIYHNINADQSKGISSSTVPATQQLFSQGNTFPPTPRPAENFRNSGLAPPVTIVQPSASAGQMLAQISRHSNPTQGATPTWTPTTRSGFSAQQVATQATAKTRTSQFGVGSFQTPSSFSSMSLPGAPTASPGAAAYPSLTNRGSNFAPETGQTAGQFQTRTAEGVGVWPQWQGQQPHHRSSSSEQHVQQPPAQQPGQPEVFQEMLSMLGDQSNSYNNEEFPDLTMFPPFSE

SEQ ID NO: 253 - DNA, 1521 bp, Homo sapiens
  CDS (353)..(1168)
cgggcttcccctccccggtccgcgggtgcccggcgcgggcccaggaggcggaggcggctcctggggagagggatccgggagtccctgaggcggccccggctccgcactaggaggcggggtccgcagtatcgccagcggccggcgcggcttcccggagccccggagcccgaggcgcgaggtttaggctgagccctccccggcgcctgcccccgcccggcgcccgcctccgcccccgcccgcggcctggagcgcgcctccctcgcctcccagggtctggcgagccggcgccggccgagctgcgggagccgcggagagcaccagctgacgccgcgggagctgctccggccgcaccatgcgggagctggccattgagatcggggtgcgagccctgctcttcggagtcttcgtttttacagagtttttggatccgttccagagagtcatccagccagaagagatctggctctataaaaatcctttggtgcaatcagataacatacctacccgcctcatgtttgcaatttctttcctcacacccctggctgttatttgtgtggtgaaaattatccggcgaacagacaagactgaaattaaggaagccttcttagcggtgtccttggctcttgctttgaatggagtctgcacaaacactattaaattaatagtgggaagacctcgccccgatttcttttaccgctgctttccagatggagtgatgaactcggaaatgcattgcacaggtgaccccgatctggtgtccgagggccgcaaaagcttccccagcatccattcctcctttgccttttcgggccttggcttcacgacgttctacttggcgggcaagctgcactgcttcaccgagagtgggcggggaaagagctggcggctctgtgctgccatcctgcccttgtactgcgccatgatgattgccctgtcccgcatgtgcgactacaagcatcactggcaagattcctttgtgggtggagtcatcggcctcatttttgcatacatttgctacagacagcactatcctcctctggccaacacagcttgccataaaccctacgttagtctgcgagtcccagcctcactgaagaaagaggagaggcccacagctgacagcgcacccagcttgcctctggaggggatcaccgaaggcccggtatgaccagtgtcctgggaggatggacactaagccctgggcacatctgccaccctgacatcataacacaatagaaatggttttctgtagtgtatttttcatcagttgtttctcaaagtcatcgtacttctgcttctgtttcactgatggtgttcctgctactttaaatgtctacttccaacatccttgaatttgcaagtgaaggacaacaatctctgagagacgtgtggaagaggctgtgaaggtggggtttggggagcttggccgattcgtctatctgaaatgtttgctgtaacagccaccttcctatgttttcatggttgtaaaacataataaaacctcccacgtggaagacttgg

SEQ ID NO: 254 - protein, 271 aa, Homo sapiens
MRELAIEIGVRALLFGVFVFTEFLDPFQRVIQPEEIWLYKNPLVQSDNIPTRLMFAISFLTPLAVICVVKIIRRTDKTEIKEAFLAVSLALALNGVCTNTIKLIVGRPRPDFFYRCFPDGVMNSEMHCTGDPDLVSEGRKSFPSIHSSFAFSGLGFTTFYLAGKLHCFTESGRGKSWRLCAAILPLYCAMMIALSRMCDYKHHWQDSFVGGVIGLIFAYICYRQHYPPLANTACHKPYVSLRVPASLKKEERPTADSAPSLPLEGITEGPV

SEQ ID NO: 255 - DNA, 1407 bp, Homo sapiens
  CDS (97)..(846)
ctctccccggcccgatccgcccgccggctccccctcccccgatccctcgggtcccgggatgggggggcggtgaggcaggcacagccccccgcccccatggccgcccgtcggagccagaggcggagggggcgccggggggagccgggcaccgccctgctggtcccgctcgcgctgggcctgggcctggcgctggcctgcctcggcctcctgctggccgtggtcagtttggggagccgggcatcgctgtccgcccaggagcctgcccaggaggagctggtggcagaggaggaccaggacccgtcggaactgaatccccagacagaagaaagccaggatcctgcgcctttcctgaaccgactagttcggcctcgcagaagtgcacctaaaggccggaaaacacgggctcgaagagcgatcgcagcccattatgaagttcatccacgacctggacaggacggagcgcaggcaggtgtggacgggacagtgagtggctgggaggaagccagaatcaacagctccagccctctgcgctacaaccgccagatcggggagtttatagtcacccgggctgggctctactacctgtactgtcaggtgcactttgatgaggggaaggctgtctacctgaagctggacttgctggtggatggtgtgctggccctgcgctgcctggaggaattctcagccactgcggcgagttccctcgggccccagctccgcctctgccaggtgtctgggctgttggccctgcggccagggtcctccctgcggatccgcaccctcccctgggcccatctcaaggctgcccccttcctcacctacttcggactcttccaggttcactgaggggccctggtctccccgcagtcgtcccaggctgccggctcccctcgacagctctctgggcacccggtcccctctgccccaccctcagccgctctttgctccagacctgcccctccctctagaggctgcctgggcctgttcacgtgttttccatcccacataaatacagtattcccactcttatcttacaactcccccaccgcccactctccacctcactagctccccaatccctgaccctttgaggcccccagtgatctcgactcccccctggccacagacccccagggcattgtgttcactgtactctgtgggcaaggatgggtccagaagaccccacttcaggcactaagaggggctggacctggcggcaggaagccaaagagactgggcctaggccaggagttcccaaatgtgaggggcgagaaacaagacaagctcctcccttgagaattccctgtggatttttaaaacagatattatttttattattattgtgacaaaatgttgataaatggatattaaatagaataagtcataaaaaaaaaaaaaaaaaaaaaa

SEQ ID NO: 256 - protein, 249 aa, Homo sapiens
MAARRSQRRRGRRGEPGTALLVPLALGLGLALACLGLLLAVVSLGSRASLSAQEPAQEELVAEEDQDPSELNPQTEESQDPAPFLNRLVRPRRSAPKGRKTRARRAIAAHYEVHPRPGQDGAQAGVDGTVSGWEEARINSSSPLRYNRQIGEFIVTRAGLYYLYCQVHFDEGKAVYLKLDLLVDGVLALRCLEEFSATAASSLGPQLRLCQVSGLLALRPGSSLRIRTLPWAHLKAAPFLTYFGLFQVH

SEQ ID NO: 257 - DNA, 2640 bp, Homo sapiens
  CDS (41)..(637)
actcgccgcagcctgcgcgccttctccagtccgcggtgccatggcccccgcccgtctgttcgcgctgctgctgttcttcgtaggcggagtcgccgagtcgatccgagagactgaggtcatcgacccccaggacctcctagaaggccgatacttctccggagccctaccagacgatgaggatgtagtggggcccgggcaggaatctgatgactttgagctgtctggctctggagatctggatgacttggaagactccatgatcggccctgaagttgtccatcccttggtgcctctagataaccatatccctgagagggcagggtctgggagccaagtccccaccgaacccaagaaactagaggagaatgaggttatccccaagagaatctcacccgttgaagagagtgaggatgtgtccaacaaggtgtcaatgtccagcactgtgcagggcagcaacatctttgagagaacggaggtcctggcagctctgattgtgggtggcatcgtgggcatcctctttgccgtcttcctgatcctactgctcatgtaccgtatgaagaagaaggatgaaggcagctatgacctgggcaagaaacccatctacaagaaagcccccaccaatgagttctacgcgtgaagcttgcttgtgggcactggcttggactttagcggggagggaagccaggggattttgaagggtggacattagggtagggtgaggtcaacctaatactgacttgtcagtatctccagctctgattacctttgaagtgttcagaagagacattgtcttctactgttctgccaggttcttcttgagctttgggcctcagttgccctggcagaaaaatggattcaacttggcctttctgaaggcaagactgggattggatcacttcttaaacttccagttaagaatctaggtccgccctcaagcccatactgaccatgcctcatccagagctcctctgaagccagggggctaacggatgttgtgtggagtcctggctggaggtcctcccccagtggccttcctcccttcctttcacagccggtctctctgccaggaaatgggggaaggaactagaaccacctgcaccttgagatgtttctgtaaatgggtacttgtgatcacactacgggaatctctgtggtatatacctggggccattctaggctctttcaagtgacttttggaaatcaaccttttttatttgggggggaggatggggaaaagagctgagagtttatgctgaaatggatttatagaatatttgtaaatctatttttagtgtttgttcgtttttttaactgttcattcctttgtgcagagtgtatatctctgcctgggcaagagtgtggaggtgccgaggtgtcttcattctctcgcacatttccacagcacctgctaagtttgtatttaatggtttttgtttttgtttttgtttgtttcttgaaaatgagagaagagccggagagatgatttttattaattttttttttttttttttttttttactatttatagctttagatagggcctcccttcccctcttctttctttgttctctttcattaaaccccttccccagttttttttttatactttaaaccccgctcctcatggccttggccctttctgaagctgcttcctcttataaaatagcttttgccgaaacatagtttttttttagcagatcccaaaatataatgaaggggatggtgggatatttgtgtctgtgttcttataatatattattattcttccttggttctagaaaaatagataaatatatttttttcaggaaatagtgtggtgtttccagtttgatgttgctgggtggttgagtgagtgaattttcatgtggctgggtgggtttttgcctttttctcttgccctgttcctggtgccttctgatggggctggaatagttgaggtggatggttctaccctttctgccttctgtttgggacccagctggtgttctttggtttgctttcttcaggctctagggctgtgctatccaatacagtaaccacatgcggctgtttaaagttaagccaattaaaatcacataagattaaaaattccttcctcagttgcactaaccacgtttctagaggcgtcactgtatgtagttcatggctactgtactgacagcgagagcatgtccatctgttggacagcactattctagagaactaaactggcttaacgagtcacagcctcagctgtgctgggacgacccttgtctccctgggtaggggggggggaatgggggagggctgatgaggccccagctggggcctgttgtctgggaccctccctctcctgagaggggaggcctggtggcttagcctgggcaggtcgtgtctcctcctgaccccagtggctgcggtgaggggaaccaccctcccttgctgcaccagtggccattagctcccgtcaccactgcaacccagggtcccagctggctgggtcctcttctgcccccagtgcccttccccttgggctgtgttggagtgagcacctcctctgtaggcacctctcacactgttgtctgttactgattttttttgataaaaagataataaaacctggtactttctaaaaaaaaaaaaaaaaaaaaaaaaaaaaaa

SEQ ID NO: 258 - protein, 198 aa, Homo sapiens
MAPARLFALLLFFVGGVAESIRETEVIDPQDLLEGRYFSGALPDDEDVVGPGQESDDFELSGSGDLDDLEDSMIGPEVVHPLVPLDNHIPERAGSGSQVPTEPKKLEENEVIPKRISPVEESEDVSNKVSMSSTVQGSNIFERTEVLAALIVGGIVGILFAVFLILLLMYRMKKKDEGSYDLGKKPIYKKAPTNEFYA

SEQ ID NO: 259 - DNA, 1000 bp, Homo sapiens
  CDS (186)..(857)
agggagacgcctagaagatggaggcccagattcttgagacgtttctctttctgatctagcaggagggacaaagagctcctccactccctcattccccaagaaggcccccagcctacccagtttccgtgaccattccgccctgggaaagcggcttcccagacctccttatctatttttcttgaatcatgagagatgaaattgcaacaacagttttctttgtcacaagattggtgaaaaaacatgataaactaagtaaacagcaaatagaagactttgcagaaaagctgatgacgatcttgtttgaaacatacagaagtcactggcactctgattgcccttctaaagggcaagccttcaggtgcatcaggataaacaacaatcagaataaagatcccattctagaaagggcatgtgtggaaagtaatgtagatttttctcacctgggacttccgaaggagatgaccatatgggtagatccctttgaagtatgctgtaggtatggtgagaaaaaccatccatttacagttgcttcttttaaaggcagatgggaggaatgggaactatatcaacaaatcagttatgccgttagtagagcctcatcagacgtttcctctggcacttcctgcgatgaagaaagttgtagcaaggaacctcgtgtcattcctaaagtcagcaatccgaagagtatttatcaggttgaaaacttgaaacagccctttcaatcttggttacaaatcccccgcaaaaagaatgtggtggacggccgtgttggcctcctgggaaacacttaccatggctcgcagaagcatcctaagtgttacaggcctgctatgcaccggctggacagaattttataacccacatctgggaatgaatttgcagcacctggtagaagaaggcaccttggaaggcactgccttgggcttccatggcaggaagatgagaagaaatcttcagggtgatttctggagcctgaaaagaataaaaaacaaaaccaaaa

SEQ ID NO: 260 - protein, 223 aa, Homo sapiens
MRDEIATTVFFVTRLVKKHDKLSKQQIEDFAEKLMTILFETYRSHWHSDCPSKGQAFRCIRINNNQNKDPILERACVESNVDFSHLGLPKEMTIWVDPFEVCCRYGEKNHPFTVASFKGRWEEWELYQQISYAVSRASSDVSSGTSCDEESCSKEPRVIPKVSNPKSIYQVENLKQPFQSWLQIPRKKNVVDGRVGLLGNTYHGSQKHPKCYRPAMHRLDRIL

SEQ ID NO: 261 - DNA, 3387 bp, Homo sapiens
  CDS (266)..(1570)
gaagaactggaactggtctggccatagggggaagcggcgcgttaaatccgccccctctccataccctactttcaaggggtgggcggtagaggggaggttggggttggagcagcggcgagggggcccctcccttgcacctccccccaccggacttggtcgcgcccgaagtgtaacactttctctttgtcggaggagctcctctgtttcctgtgcagtagctcccgttgcggcggcacccgtggcagccctggcggacgcaggagcgatggcagcgaccgatatagctcgccaggtgggtgaaggttgccgaactgtccccctggctggacatgtggggtttgacagcttgcctgaccagctggtgaataagtccgtcagccagggcttctgcttcaacatcctgtgcgtgggagagacaggtttgggcaagtccaccctcatggacaccctgttcaacaccaaattcgaaggggagccagccacccacacacagccgggtgtccagctccagtctaatacctatgacctccaagagagcaacgtgaggctaaagctcacgatcgttagcacagttggctttggggaccagatcaacaaagaggacagctacaagcctatcgtggaattcatcgatgcacaattcgaggcctacctgcaggaagagctaaagatccgaagagtgctacacacctaccatgactcccgaatccatgtctgcttgtatttcattgcccccacgggtcattccctgaagtctctggacctagtgactatgaagaagctggacagtaaggtgaacatcatccccatcattgccaaagcagatgccatttcgaagagtgagctaacaaagttcaaaatcaaaatcaccagcgagcttgtcagcaacggagtccagatctatcagtttcctacagatgatgagtcggtggcagagatcaatggaaccatgaacgcccacctgccgtttgctgtcattggcagcacagaagaactgaagataggcaacaagatgatgagggcgcggcagtatccttggggcactgtgcaggttgaaaacgaggcccactgcgactttgtgaagctgcgggagatgctgattcgggtcaacatggaggatctgcgggagcagacccacacccggcactatgagctgtatcgccgctgtaagctggaggagatgggcttcaaggacaccgaccctgacagcaaacccttcagtttacaggagacatatgaggccaaaaggaacgagttcctaggggaactccagaaaaaagaagaggagatgagacagatgttcgtccagcgagtcaaagagaaagaagcggagctcaaagaggcagagaaagagctgcacgagaagtttgaccgtctgaagaaactgcaccaggacgagaagaagaaactggaggataagaagaaatccctggatgatgaagtgaatgctttcaagcaaagaaagacggcggctgagctgctccagtcccagggctcccaggctggaggctcacagactctgaagagagacaaagagaagaaaaataatccatggctgtgtactgaatagtattccccgctacagctggactggactccatttagccttttaagccgaggttcctattttaactgacagctttcctttggggtgccaggcagcgaggccccccacccctatcctgccatgtacttcaagctcacttcttctttttgagttccgcaacttgctcctgcctcccagccccactggcactgaccatgaccacctacttctattttttttttagagtttctttttttgatcacttactttcaaagcacacagtcaaacaaggttatgccaaatttccaggcctttttgaagtattgagaaggggaaggggatttctcacttcaattatagatcataataggaagcaaaaagaaaaaaatgaaaagcaaacatatgcacgcacttttcttgttgacaaagcaagaatataggtttgctgtgtaggtttggtgctctattgattggtgagtgaccagagcaagtatgaaggtgatgctgccaaagcacaagccagtttcttgggaaaattcaagttacagtggagtatttttttgaagaccatatgcttggaggtagaaacaaaccaacgaccaaaaaaaaaaaaaaaaaaatctgctcagatactcagccagtagctcagagagatgctgagttaggcctgtcaggtctccttgggaaaggcttcatatttgcaactttgatgattctatgtccagcttcagagctgctttcccagaaattcacgcttaaacaaccaaccggtaaccaccacttccccacaccgccgcccggtaattatttgcattacaaaccggaggcgccctcatttgcatttgtgtacagattaactagttaaggcttgagaagctctgaataattcaaaagtattagacccacacagccttggagagaccttcagaaactaaggaggagttttatattaagggagacattttagtcagtaagacgatataacctacttactccgtaaggggaaatgaaggcccagagaagggaagggacttgaccgaggtcccacttctgtttcgaggcagaagccagactaattttcatgcctcctgactcccaatcagtttcacaaagggattcaatctgtttatatacgttacattcctggatacgaggtcttttgatgttcagagtaactgactagttagtattagaagaccctcgaggtttttttccacagaaaaacatctgaagatggattgggtgagggctggcaaaacgaaggcatgccgggccagctccttaacccaatgacccagtgatgctgcaaggctggaacggggtccaggagactgtgtgtaacaggtgccctaggtgacccttataatcagggaagtttggtgaacaaaaatcgaacccatgagtgaacataaattaaaaagttgatcaacctattaaaatgtgtatttcattgggtagcttttctcactgtagacagattttttccttcttcaatgaaaaggcttttaaattagtacaactgttactatttaaaaaaaaaataccctaagtactctgtttacttctggtgaaacaaaaccagtcattagaaatggtctgtgcttttattttcccagactggagtggcttttctgaaacacacacacacacacacacacacacacacacacacacacacacacacacgtacacacatccctcacttctcttaagccaagaagtttgctttccctagctgcagtgtagatggctcttgtttttgtttttttgttttaatcatttggcattcacatgtggctgttaatatgtgcttgtttttaattaaaacaagaagctttaaa

SEQ ID NO: 262 - protein, 434 aa, Homo sapiens
MAATDIARQVGEGCRTVPLAGHVGFDSLPDQLVNKSVSQGFCFNILCVGETGLGKSTLMDTLFNTKFEGEPATHTQPGVQLQSNTYDLQESNVRLKLTIVSTVGFGDQINKEDSYKPIVEFIDAQFEAYLQEELKIRRVLHTYHDSRIHVCLYFIAPTGHSLKSLDLVTMKKLDSKVNIIPIIAKADAISKSELTKFKIKITSELVSNGVQIYQFPTDDESVAEINGTMNAHLPFAVIGSTEELKIGNKMMRARQYPWGTVQVENEAHCDFVKLREMLIRVNMEDLREQTHTRHYELYRRCKLEEMGFKDTDPDSKPFSLQETYEAKRNEFLGELQKKEEEMRQMFVQRVKEKEAELKEAEKELHEKFDRLKKLHQDEKKKLEDKKKSLDDEVNAFKQRKTAAELLQSQGSQAGGSQTLKRDKEKKNNPWLCTE

SEQ ID NO: 263 - DNA, 1182 bp, Homo sapiens
  CDS (105)..(599)
ggttcctccccactctgtctttctcacctctccttcacttttcctagcctcctcaccaccatctgatctatcttgttctcttcacaaaaggctctgaagacatcatgaacccacaacgggaggcagcacccaaatcctatgctattcgtgattctcgacagatggtgtgggtcctgagtggaaattctttaatagcagctcctcttagccgcagcattaagcctgtcactcttcatttaatagcctgtagagacacagaattcagtgacaaggaaaagggtaatatggtttacctgggaatcaagggaaaagatctctgtctcttctgtgcagaaattcagggcaagcctactttgcagcttaagcttcagggctcccaagataacatagggaaggacacttgctggaaactagttggaattcacacatgcataaacctggatgtgagagagagctgcttcatgggaacccttgaccaatggggaataggagtgggtagaaagaagtggaagagttcctttcaacatcaccatctcaggaagaaggacaaagatttctcatccatgcggaccaacataggaatgccaggaaggatgtagaaataaggggaggaagattcccatctctacaatctttgagtgggtttgctatcaatgaaatgctacaaatggaataagttgcagaaatttttctcttttcttgggttctggagagtttgtaaaacaaggacactatgtatttttaaagagttggtaaatcttacctgtaaagctagagaaggtcggagtctttttaggagtagatttggactacataacctgtaaatgtgttttgtccagtccttagagtgttttttaaaaaattgtaaagtcaaggttttcatgaaaaatgggaagatcagacaacattgctcctgaattcccacagagcagcaagctactagagctcaatctgttatttcttttcctgatgtacaggggttaagtcctatggaagaaacagcagaattattcaaaattatttacataatgtgcaattattcactagagcatgaggagtgaaacgctctgtttagtatgtataacttaaaaggaacacatacaattaaaagtaattgaaagacatttcttcttaaaaattctataatcttacactggtaaaataaactagtttttcccatgt

SEQ ID NO: 264 - protein, 164 aa, Homo sapiens
MNPQREAAPKSYAIRDSRQMVWVLSGNSLIAAPLSRSIKPVTLHLIACRDTEFSDKEKGNMVYLGIKGKDLCLFCAEIQGKPTLQLKLQGSQDNIGKDTCWKLVGIHTCINLDVRESCFMGTLDQWGIGVGRKKWKSSFQHHHLRKKDKDFSSMRTNIGMPGRM

SEQ ID NO: 265 - DNA, 1629 bp, Homo sapiens
  CDS (60)..(596)
acacatcaggggcttgctcttgcaaaaccaaaccacaagacagacttgcaaaagaaggcatgcacagctcagcactgctctgttgcctggtcctcctgactggggtgagggccagcccaggccagggcacccagtctgagaacagctgcacccacttcccaggcaacctgcctaacatgcttcgagatctccgagatgccttcagcagagtgaagactttctttcaaatgaaggatcagctggacaacttgttgttaaaggagtccttgctggaggactttaagggttacctgggttgccaagccttgtctgagatgatccagttttacctggaggaggtgatgccccaagctgagaaccaagacccagacatcaaggcgcatgtgaactccctgggggagaacctgaagaccctcaggctgaggctacggcgctgtcatcgatttcttccctgtgaaaacaagagcaaggccgtggagcaggtgaagaatgcctttaataagctccaagagaaaggcatctacaaagccatgagtgagtttgacatcttcatcaactacatagaagcctacatgacaatgaagatacgaaactgagacatcagggtggcgactctatagactctaggacataaattagaggtctccaaaatcggatctggggctctgggatagctgacccagccccttgagaaaccttattgtacctctcttatagaatatttattacctctgatacctcaacccccatttctatttatttactgagcttctctgtgaacgatttagaaagaagcccaatattataatttttttcaatatttattattttcacctgtttttaagctgtttccatagggtgacacactatggtatttgagtgttttaagataaattataagttacataagggaggaaaaaaaatgttctttggggagccaacagaagcttccattccaagcctgaccacgctttctagctgttgagctgttttccctgacctccctctaatttatcttgtctctgggcttggggcttcctaactgctacaaatactcttaggaagagaaaccagggagcccctttgatgattaattcaccttccagtgtctcggagggattcccctaacctcattccccaaccacttcattcttgaaagctgtggccagcttgttatttataacaacctaaatttggttctaggccgggcgcggtggctcacgcctgtaatcccagcactttgggaggctgaggcgggtggatcacttgaggtcaggagttcctaaccagcctggtcaacatggtgaaaccccgtctctactaaaaatacaaaaattagccgggcatggtggcgcgcacctgtaatcccagctacttgggaggctgaggcaagagaattgcttgaacccaggagatggaagttgcagtgagctgatatcatgcccctgtactccagcctgggtgacagagcaagactctgtctcaaaaaataaaaataaaaataaatttggttctaatagaactcagttttaactagaatttattcaattcctctgggaatgttacattgtttgtctgtcttcatagcagattttaattttgaataaataaatgtatcttattcacatc

SEQ ID NO: 266 - protein, 178 aa, Homo sapiens
MHSSALLCCLVLLTGVRASPGQGTQSENSCTHFPGNLPNMLRDLRDAFSRVKTFFQMKDQLDNLLLKESLLEDFKGYLGCQALSEMIQFYLEEVMPQAENQDPDIKAHVNSLGENLKTLRLRLRRCHRFLPCENKSKAVEQVKNAFNKLQEKGIYKAMSEFDIFINYIEAYMTMKIRN

SEQ ID NO: 267 - DNA, 7171 bp, Homo sapiens
  CDS (128)..(6121)
atcggaggggggtcgggaggaggaggaggaggcagcggcagagaagagagaggcgtgtgagccgtgctccaccggctagctccttcccgctgctcctgcctggcagtgccaggcagcccacaccagcatggccttgctcatccacctcaagacagtctcggagctgcggggcaggggcgaccggatcgccaaagtgactttccgagggcaatccttctactctcgggtcctggagaactgtgaggatgtggctgactttgatgagacatttcggtggccggtggccagcagcatcgacagaaatgagatgctggagattcaggttttcaactacagcaaagtcttcagcaacaagctcatcgggaccttccgcatggtgctgcagaaggtggtagaggagagccatgtggaggtgactgacacgctgattgatgacaacaatgctatcatcaagaccagcctgtgcgtggaggtccggtatcaggccactgacggcacagtgggctcctgggacgatggggacttcctgggagatgagtctcttcaagaggaagagaaggacagccaagagacggatggactgctcccaggctcccggcccagctcccggcccccaggagagaagagcttccggagagccgggaggagcgtgttctccgccatgaagctcggcaaaaaccggtctcacaaggaggagccccaaagaccagatgaaccggcggtgctggagatggaagaccttgaccatctggccattcggctaggagatggactggatcccgactcggtgtctctagcctcagtcacagctctcaccactaatgtctccaacaagcgatctaagccagacattaagatggagccaagtgctgggcggcccatggattaccaggtcagcatcacggtgatcgaggcccggcagctggtgggcttgaacatggaccctgtggtgtgcgtggaggtgggtgacgacaagaagtacacatccatgaaggagtccactaactgcccctattacaacgagtacttcgtcttcgacttccatgtctctccggatgtcatgtttgacaagatcatcaagatttcggtgattcactccaagaacctgctgcgcagtggcaccctggtgggctccttcaaaatggacgtgggaaccgtgtactcgcagccagagcaccagttccatcacaagtgggccatcctgtctgaccccgatgacatctcctcggggctgaagggctacgtgaagtgtgacgttgccgtggtgggcaaaggggacaacatcaagacgccccacaaggccaatgagaccgacgaagatgacattgaggggaacttgctgctccccgagggggtgccccccgaacgccagtgggcccggttctatgtgaaaatttaccgagcagaggggctgccccgtatgaacacaagcctcatggccaatgtaaagaaggctttcatcggtgaaaacaaggacctcgtggacccctacgtgcaagtcttctttgctggccagaagggcaagacttcagtgcagaagagcagctatgagcccctgtggaatgagcaggtcgtctttacagacctcttccccccactctgcaaacgcatgaaggtgcagatccgagactcggacaaggtcaacgacgtggccatcggcacccacttcattgacctgcgcaagatttctaatgacggagacaaaggcttcctgcccacactgggcccagcctgggtgaacatgtacggctccacacgtaactacacgctgctggatgagcatcaggacctgaacgagggcctgggggagggtgtgtccttccgggcccggctcctgctgggcctggctgtggagatcgtagacacctccaaccctgagctcaccagctccacagaggtgcaggtggagcaggccacgcccatctcggagagctgtgcaggtaaaatggaagaattctttctctttggagccttcctggaggcctcaatgatcgaccggagaaacggagacaagcccatcacctttgaggtcaccataggcaactatgggaacgaagttgatggcctgtcccggccccagcggcctcggccccggaaggagccgggggatgaggaagaagtagacctgattcagaacgcaagtgatgacgaggccggtgatgccggggacctggcctcagtctcctccactccaccaatgcggccccaggtcaccgacaggaactacttccatctgccctacctggagcgaaagccctgcatctacatcaagagctggtggccggaccagcgccgccgcctctacaatgccaacatcatggaccacattgccgacaagctggaagaaggcctgaacgacatacaggagatgatcaaaacggagaagtcctaccctgagcgtcgcctgcggggcgtcctggaggagctgagctgtggctgctgccgcttcctctccctcgctgacaaggaccagggccactcatcccgcaccaggcttgaccgggagcgcctcaagtcctgcatgagggagctggaaaacatggggcagcaggccaggatgctgcgggcccaggtgaagcggcacacggtgcgggacaagctgaggctgtgccagaacttcctgcagaagctgcgcttcctggcggacgagccccagcacagcattcccgacatcttcatctggatgatgagcaacaacaagcgtgtcgcctatgcccgtgtgccctccaaggacctgctcttctccatcgtggaggaggagactggcaaggactgcgccaaggtcaagacgctcttccttaagctgccagggaagcggggcttcggctcggcaggctggacagtgcaggccaaggtggagctgtacctgtggctgggcctcagcaaacagcgcaaggagttcctgtgcggcctgccctgtggcttccaggaggtcaaggcagcccagggcctgggcctgcatgccttcccacccgtcagcctggtctacaccaagaagcaggcgttccagctccgagcgcacatgtaccaggcccgcagcctctttgccgccgacagcagcggactctcagacccctttgcccgcgtcttcttcatcaatcagagtcagtgcacagaggtgctgaatgagaccctgtgtcccacctgggaccagatgctggtgttcgacaacctggagctctatggtgaagctcatgagctgagggacgatccgcccatcattgtcattgaaatctatgaccaggattccatgggcaaagctgacttcatgggccggaccttcgccaaacccctggtgaagatggcagacgaggcgtactgcccaccccgcttcccacctcagctcgagtactaccagatctaccgtggcaacgccacagctggagacctgctggcggccttcgagctgctgcagattggaccagcagggaaggctgacctgccccccatcaatggcccggtggacgtggaccgaggtcccatcatgcccgtgcccatgggcatccggcccgtgctcagcaagtaccgagtggaggtgctgttctggggcctacgggacctaaagcgggtgaacctggcccaggtggaccggccacgggtggacatcgagtgtgcagggaagggggtgcagtcgtccctgatccacaattataagaagaaccccaacttcaacaccctcgtcaagtggtttgaagtggacctcccagagaacgagctgctgcacccgcccttgaacatccgtgtggtggactgccgggccttcggtcgctacacactggtgggctcccatgccgtcagctccctgcgacgcttcatctaccggcccccagaccgctcggcccccagctggaacaccacggtcaggcttctccggcgctgccgtgtgctgtgcaatgggggctcctcctctcactccacaggggaggttgtggtgactatggagccagaggtacccatcaagaaactggagaccatggtgaagctggacgcgacttctgaagctgttgtcaaggtggatgtggctgaggaggagaaggagaagaagaagaagaagaagggcactgcggaggagccagaggaggaggagccagacgagagcatgctggactggtggtccaagtactttgcctccattgacaccatgaaggagcaacttcgacaacaagagccctctggaattgacttggaggagaaggaggaagtggacaataccgagggcctgaaggggtcaatgaagggcaaggagaaggcaagggctgccaaagaggagaagaagaagaaaactcagagctctggctctggccaggggtccgaggcccccgagaagaagaaacccaagattgatgagcttaaggtataccccaaagagctggagtccgagtttgataactttgaggactggctgcacactttcaacttgcttcggggcaagaccggggatgatgaggatggctccaccgaggaggagcgcattgtgggacgcttcaagggctccctctgcgtgtacaaagtgccactcccagaggacgtgtcccgggaagccggctacgactccacctacggcatgttccagggcatcccgagcaatgaccccatcaatgtgctggtccgagtctatgtggtccgggccacggacctgcaccctgctgacatcaacggcaaagctgacccctacatcgccatccggctaggcaagactgacatccgcgacaaggagaactacatctccaagcagctcaaccctgtctttgggaagtcctttgacatcgaggcctccttccccatggaatccatgctgacggtggctgtgtatgactgggacctggtgggcactgatgacctcattggggaaaccaagatcgacctggagaaccgcttctacagcaagcaccgcgccacctgcggcatcgcccagacctactccacacatggctacaatatctggcgggaccccatgaagcccagccagatcctgacccgcctctgcaaagacggcaaagtggacggcccccactttgggccccctgggagagtgaaggtggccaaccgcgtcttcactgggccctctgagattgaggacgagaacggtcagaggaagcccacagacgagcatgtggcgctgttggccctgaggcactgggaggacatcccccgcgcaggctgccgcctggtgccagagcatgtggagacgaggccgctgctcaaccccgacaagccgggcatcgagcagggccgcctggagctgtgggtggacatgttccccatggacatgccagcccctgggacgcctctggacatctcacctcggaagcccaagaagtacgagctgcgggtcatcatctggaacacagatgaggtggtcttggaggacgacgacttcttcacaggggagaagtccagtgacatcttcgtgagggggtggctgaagggccagcaggaggacaagcaggacacagacgtccactaccactccctcactggcgagggcaacttcaactggcgctacctgttccccttcgactacctggcggcggaggagaagatcgtcatctccaagaaggagtccatgttctcctgggacgagaccgagtacaagatccccgcgcggctcaccctgcagatctgggatgcggaccacttctccgctgacgacttcctgggggccatcgagctggacctgaaccggttcccgcggggcgcaaagacagccaagcagtgcaccatggagatggccaccggggaggtggacgtgcccctcgtgtccatcttcaagcaaaagcgcgtcaaaggctggtggcccctcctggcccgcaatgagaacgatgagtttgagctcacgggcaaggtggaggctgagctgcatttactgacagcagaggaggcagagaagaacccagtgggcctggcccgcaatgaacctgaccccctagagaaacccaaccggcccgacacgagcttcatctggttcctgaaccctctcaagtcggctcgctacttcttgtggcacacgtatcgctggctgctcctcaaactgttgctgctcctgctgctgctcctcctcctcgccctgttcctctactctgtgcctggctacctggtcaagaaaatcctcggggcctgagcccagtggcctcctggccggcccgacacggccttcgtctggttcctcaaccctctcaagtccatcaagtacctcatctgcacccggtacaagtggctcatcatcaagatcgtgctggcgctgttggggctgctcatgttggggctcttcctctacagcctccctggctacatggtcaaaaagctccttggggcatgaaggccgccagctcccgccagccgctccccagccctgccgcatttcctttcagtggcttggactctttcccatctcccctggggagcctgaggagcccagcgtccactcttcatgccttgggccgagcctgcctcctgcttgcgggggccgcctgtcctcactgccccaggctgcggcttgcccagtcccgcccctctgacccctgcctgtgggctggggagccttggatggggtggggacctggaatgggtctctcttgccccacctggctgaggcgccacccttcttcaggcccaggctccagaggaagactcctgaaaccctccccaggtcttccaagtacaggattgaagctttagtgaaattaaccaaggaccatgggtcagtgcccagggctttaaaaagaatgaacgagcaaaaggtatccccgccgtgacccctgcagatagcaccggtctttgatccgcagcaggggccagaccctgcccacaagtcccagcgcggctgcttctgccactgctgggctccacttggctcctctcacttcccagggggtcgcctgtcctgcctgtgggtttccatggcttcccagagctccctctgccccagccagcgcctccaggcccagctgaggagctgtgagaagcagcagaggggactccccatcccgggcacaccctgtcctcccacccctgcccccttgcccttccagccctttcagctgcagctgggagctggcccgtcaagtgctgcccctgcctgtgtctgggtttctgttggctgtttttcttttcttgagtggtgatttttctctaaataaaagaagtcaagcactgaaaaaaaaaaaaaaaa

SEQ ID NO: 268 - protein, 1997 aa, Homo sapiens
MALLIHLKTVSELRGRGDRIAKVTFRGQSFYSRVLENCEDVADFDETFRWPVASSIDRNEMLEIQVFNYSKVFSNKLIGTFRMVLQKVVEESHVEVTDTLIDDNNAIIKTSLCVEVRYQATDGTVGSWDDGDFLGDESLQEEEKDSQETDGLLPGSRPSSRPPGEKSFRRAGRSVFSAMKLGKNRSHKEEPQRPDEPAVLEMEDLDHLAIRLGDGLDPDSVSLASVTALTTNVSNKRSKPDIKMEPSAGRPMDYQVSITVIEARQLVGLNMDPVVCVEVGDDKKYTSMKESTNCPYYNEYFVFDFHVSPDVMFDKIIKISVIHSKNLLRSGTLVGSFKMDVGTVYSQPEHQFHHKWAILSDPDDISSGLKGYVKCDVAVVGKGDNIKTPHKANETDEDDIEGNLLLPEGVPPERQWARFYVKIYRAEGLPRMNTSLMANVKKAFIGENKDLVDPYVQVFFAGQKGKTSVQKSSYEPLWNEQVVFTDLFPPLCKRMKVQIRDSDKVNDVAIGTHFIDLRKISNDGDKGFLPTLGPAWVNMYGSTRNYTLLDEHQDLNEGLGEGVSFRARLLLGLAVEIVDTSNPELTSSTEVQVEQATPISESCAGKMEEFFLFGAFLEASMIDRRNGDKPITFEVTIGNYGNEVDGLSRPQRPRPRKEPGDEEEVDLIQNASDDEAGDAGDLASVSSTPPMRPQVTDRNYFHLPYLERKPCIYIKSWWPDQRRRLYNANIMDHIADKLEEGLNDIQEMIKTEKSYPERRLRGVLEELSCGCCRFLSLADKDQGHSSRTRLDRERLKSCMRELENMGQQARMLRAQVKRHTVRDKLRLCQNFLQKLRFLADEPQHSIPDIFIWMMSNNKRVAYARVPSKDLLFSIVEEETGKDCAKVKTLFLKLPGKRGFGSAGWTVQAKVELYLWLGLSKQRKEFLCGLPCGFQEVKAAQGLGLHAFPPVSLVYTKKQAFQLRAHMYQARSLFAADSSGLSDPFARVFFINQSQCTEVLNETLCPTWDQMLVFDNLELYGEAHELRDDPPIIVIEIYDQDSMGKADFMGRTFAKPLVKMADEAYCPPRFPPQLEYYQIYRGNATAGDLLAAFELLQIGPAGKADLPPINGPVDVDRGPIMPVPMGIRPVLSKYRVEVLFWGLRDLKRVNLAQVDRPRVDIECAGKGVQSSLIHNYKKNPNFNTLVKWFEVDLPENELLHPPLNIRVVDCRAFGRYTLVGSHAVSSLRRFIYRPPDRSAPSWNTTVRLLRRCRVLCNGGSSSHSTGEVVVTMEPEVPIKKLETMVKLDATSEAVVKVDVAEEEKEKKKKKKGTAEEPEEEEPDESMLDWWSKYFASIDTMKEQLRQQEPSGIDLEEKEEVDNTEGLKGSMKGKEKARAAKEEKKKKTQSSGSGQGSEAPEKKKPKIDELKVYPKELESEFDNFEDWLHTFNLLRGKTGDDEDGSTEEERIVGRFKGSLCVYKVPLPEDVSREAGYDSTYGMFQGIPSNDPINVLVRVYVVRATDLHPADINGKADPYIAIRLGKTDIRDKENYISKQLNPVFGKSFDIEASFPMESMLTVAVYDWDLVGTDDLIGETKIDLENRFYSKHRATCGIAQTYSTHGYNIWRDPMKPSQILTRLCKDGKVDGPHFGPPGRVKVANRVFTGPSEIEDENGQRKPTDEHVALLALRHWEDIPRAGCRLVPEHVETRPLLNPDKPGIEQGRLELWVDMFPMDMPAPGTPLDISPRKPKKYELRVIIWNTDEVVLEDDDFFTGEKSSDIFVRGWLKGQQEDKQDTDVHYHSLTGEGNFNWRYLFPFDYLAAEEKIVISKKESMFSWDETEYKIPARLTLQIWDADHFSADDFLGAIELDLNRFPRGAKTAKQCTMEMATGEVDVPLVSIFKQKRVKGWWPLLARNENDEFELTGKVEAELHLLTAEEAEKNPVGLARNEPDPLEKPNRPDTSFIWFLNPLKSARYFLWHTYRWLLLKLLLLLLLLLLLALFLYSVPGYLVKKILGA

SEQ ID NO: 269 - DNA, 2891 bp, Homo sapiens
  CDS (109)..(1239)
gctccctcgccgccctgaaccggcggctagactgcgcatgcgtgtcagtggcgctagcggcggacccggctgggcagttccttccccagaaggagagattcctctgccatggagtcctacgatgtgatcgccaaccagcctgtcgtgatcgacaacggatccggtgtgattaaagctggttttgctggtgatcagatccccaaatactgctttccaaactatgtgggccgacccaagcacgttcgtgtcatggcaggagcccttgaaggcgacatcttcattggccccaaagctgaggagcaccgagggctgctttcaatccgctatcccatggagcatggcatcgtcaaggattggaacgacatggaacgcatttggcaatatgtctattctaaggaccagctgcagactttctcagaggagcatcctgtgctcctgactgaggcgcctttaaacccacgaaaaaaccgggaacgagctgccgaagttttcttcgagaccttcaatgtgcccgctcttttcatctccatgcaagctgtactcagcctttacgctacaggcaggaccacaggggtggtgctggattctggggatggagtcacccatgctgtgcccatctatgagggctttgccatgccccactccatcatgcgcatcgacatcgcgggccgggacgtctctcgcttcctgcgcctctacctgcgtaaggagggctacgacttccactcatcctctgagtttgagattgtcaaggccataaaagaaagagcctgttacctatccataaacccccaaaaggatgagacgctagagacagagaaagctcagtactacctgcctgatggcagcaccattgagattggtccttcccgattccgggcccctgagttgctcttcaggccagatttgattggagaggagagtgaaggcatccacgaggtcctggtgttcgccattcagaagtcagacatggacctgcggcgcacgcttttctctaacattgtcctctcaggaggctctaccctgttcaaaggttttggtgacaggctcctgagtgaagtgaagaaactagctccaaaagatgtgaagatcaggatatctgcacctcaggagagactgtattccacgtggattgggggctccatccttgcctccctggacacctttaagaagatgtgggtctccaaaaaggaatatgaggaagacggtgcccgatccatccacagaaaaaccttctaatgtcgggacatcatcttcacctctctctgaagttaactccactttaaaactcgctttcttgagtcggagtgtttgcgaggaactgcctgtgtgtgagtgcgtgtgtggatatgagtgtgtgtgcacatgcgagtgccgtgtggccctgggaccctgggcccagaaaggacgatgaactacctgcagtggtgatggcctgaggcctggggttgaccactaactggctcctgacagggaagagcgctggcagaggctgtgctccctcctcaggtggcctctggctggctgtgggggactccgtttactaccacagggagacagagggaggtaagccatcccccgggagaccttgctgctgaccatcctaggctgggctggccccaccctcacccccacccccagggtgccctgaggccccaggcagctgctgcctccactatcgatgcctcctgactgcacactgaggactgggactggggttgagttctgtctggttttgttgccattttggtttgggaggctggaaaagcaccccaagagctattacagagactggagtcaggagagagcaggaggccctcatgttcaccagggaacaggaccacaccggccactggaggagggcaggagcagtcctcactctgaatggctgcagagttaatgttcccagcccagtcccctttcgggggccttgggagagtttaaggcacctgctggttccaggacctcgctttccatctgttcttgttgcaatgccatcttcaaaccgttttatttattgaagtgtttgttcagttaggggctggagagagggagcttgctgcctcctgccttgctacactaatgtttacagcacctaagcttagcctccagggccccacctctcccagctgatggtgagctgacagtgtccacaggttccaggaccatttgagattggaagctacactcaaagacactcccaccaggctctttctcccttttcctcttgctcactgccctggaatcaacaggctggttgctggttagattttctgaaacaggaggtaaaatttttctttggcagaggcccctaagcaagggaggggtgttggagagccagtgcccttaagactggagaaagctgcaatttaccaagttgccttttgccactgtagctgaccaggggactaggttgtagaggtgggaaggccccctctgggctgatcttgtgccattcttgaccttggacctgcttggttaaggagggagtgggccagaccagagtgccaggagctaatggagccaggcctgactcctaggagtggtccaaaggccttcagcctagatggtgcaaagctggggccagcctgtcttcaccggcaccctcacctgtgacaccaagacccaccccaatcccagacttcacacagtattctcccccacgccgtcctatgaccaaaggcccctgccaggtgtgggccacagcagcaggtatgtgtgaaagcaacgtagcgccccgcggactgcagtgcgcttaaccaactcacctcccttctcttagcccaagcctgtccctcgcacagcctcgcacaaaccacattgcctggtggggcccagtgtactgaaataaagtcgttccgatagacacgtcaaaaaaaaaaaaaaaaaaa

SEQ ID NO: 270 - protein, 376 aa, Homo sapiens
MESYDVIANQPVVIDNGSGVIKAGFAGDQIPKYCFPNYVGRPKHVRVMAGALEGDIFIGPKAEEHRGLLSIRYPMEHGIVKDWNDMERIWQYVYSKDQLQTFSEEHPVLLTEAPLNPRKNRERAAEVFFETFNVPALFISMQAVLSLYATGRTTGVVLDSGDGVTHAVPIYEGFAMPHSIMRIDIAGRDVSRFLRLYLRKEGYDFHSSSEFEIVKAIKERACYLSINPQKDETLETEKAQYYLPDGSTIEIGPSRFRAPELLFRPDLIGEESEGIHEVLVFAIQKSDMDLRRTLFSNIVLSGGSTLFKGFGDRLLSEVKKLAPKDVKIRISAPQERLYSTWIGGSILASLDTFKKMWVSKKEYEEDGARSIHRKTF

SEQ ID NO: 271 - DNA, 1671 bp, Homo sapiens
  CDS (70)..(519)
ccggtctttccagccccgagagggacctggttcctctgcccaggcttctgtcactctgtcacctacgctatgccctgctgtagtcacaggaggtgtagagaggaccccgggacatctgaaagccaggaaatggaggagtgggctttgctggatatttcccagaggaaactctacaaggaagtgatgctggaaactttcaggaacctgacctctgtaggaaaaagttggaaagaccagaacattgaatatgagtaccaaaaccccaggagaaacttcaggagtctcatagaaaagaaagtcaatgaaattaaagatgacagtcattgtggagaaacttttacccaggttccagatgacaggctgaacttccaggagaagaaagcttctcctgaaataaaatcatgtgacagctttgtgtgtggagaagttggcctaggtaactcatcttttaatatgaacatcagaggtgacattggacacaaggcctatgagtatcaggaatatggaccgaagccataaaaaaatctcactctgtcacccaggctggagtgcagtggcatgatctcaggtcgctgcaacctctgcctccagggttcaagcaactctcctgcttcagcctcctgagtagctgggactacaggcatgcaccaccacgccaggctaattttttgtattttttagtagagacagggtttcaccatattggccaggctggtcttgaactccagacctcatgattcgcctgcctcggcctcccaaaatgctgggattacagatatgagccatcatgcccagccgcaaccctaatttttcattcagtcataataccaacagttatctcatgtacctctgagtgccttcttcccaaaagccagcagtaccatacctgctgtcagcaagtgtgtaatataccatagtgataaatatgaccaaaagccataaatgactgtgagatgtatgagaatgacacgtcacattagtaagaagagaaaaattttggccatgtttatgatttgaaatatgttttcctctatcacatttagaaatatagttacaaaatgcccttagttttatcctgattcatcatggtcactgaggagcatcgtctcatatgcctggtatgtgacatgtgtctcttcaacagtaaaagacttggcattggctgggcatggtggctcacgcctgtaatcccagcactttgggaggccgaggtcaggagttagagaccattctgaccaatatgatcaaaccccgtctctactaaaaatacaaaaattagcggggtgtggtggcatgctcctgtaatcctagctattcaggaggctgacgcaggagacttgcttgaatataggaggcagacgttgcagtgagccgaggtcacaccattcactccagcctgggcaacaagagcgaaactccgtttcaaaaaaaaaaaaaatgacttggacttgtggtgaggggaggtcatctgtagactcctggacctgtttttgccttacttattctctaaagactgaaatatttcctaaaatgtatgggcactgtttaccagaaagtaccttagttaaaacataaaatcatttatgccttataaagctatattttttcaattgctttactgagtcataggaggctaataaatttgtgtaaattgtctaaaaaaaaaaaaaa

SEQ ID NO: 272 - protein, 149 aa, Homo sapiens
MPCCSHRRCREDPGTSESQEMEEWALLDISQRKLYKEVMLETFRNLTSVGKSWKDQNIEYEYQNPRRNFRSLIEKKVNEIKDDSHCGETFTQVPDDRLNFQEKKASPEIKSCDSFVCGEVGLGNSSFNMNIRGDIGHKAYEYQEYGPKP

SEQ ID NO: 273 - DNA, 6335 bp, Homo sapiens
  CDS (147)..(5132)
gcccaacatggctggagcgcggcggaggtgagccggccgcccgcccgcagacgccccagcctactgcgcccgagtcccgcggccccagtggcgcctcagctctgcggtgccgaggcccaacggctcgatcgctgcccgccgccagcatgttgggcgccccggacgagagctccgtgcgggtggctgtcagaataagaccacagcttgccaaagagaagattgaaggatgccatatttgtacatctgtcacaccaggagagcctcaggtcttcctagggaaagataaggcttttacttttgactatgtatttgacattgactcccagcaagagcagatctacattcaatgtatagaaaaactaattgaaggttgctttgaaggatacaatgctacagtttttgcttatggacaaactggagctggtaaaacatacacaatgggaacaggatttgatgttaacattgttgaggaagaactgggtattatttctcgagctgttaaacacctttttaagagtattgaagaaaaaaaacacatagcaattaaaaatgggcttcctgctccagattttaaagtgaatgcccaattcttagagctctataatgaagaggtccttgacttatttgataccactcgtgatattgatgcaaaaagtaaaaaatcaaatataagaattcatgaagattcaactggaggaatttatactgtgggcgttacaacacgtactgtgaatacagaatcagagatgatgcagtgtttgaagttgggtgctttatcccggacaactgccagtacccagatgaatgttcagagctctcgttcacatgccatttttaccattcatgtgtgtcaaaccagagtgtgtccccaaatagatgctgacaatgcaactgataataaaattatttctgaatcagcacagatgaatgaatttgaaaccctgactgcaaagttccattttgttgatctcgcaggatctgaaagactgaagcgtactggagctacaggcgagagggcaaaagaaggcatttctatcaactgtggacttttggcacttggcaatgtaataagtgccttgggagacaagagcaagagggccacacatgtcccctatagagattccaagctaacaagactactacaggattccctcgggggtaatagccaaacaatcatgatagcatgtgtcagcccttcagacagagactttatggaaacgttaaacaccctgaaatacgccaatcgagctagaaatatcaagaataaggtgatggtcaatcaggacagagctagtcagcaaatcaatgcacttcgtagtgaaatcacacgacttcagatggagctcatggagtacaaaacaggtaaaagaataattgacgaagagggtgtggaaagcatcaatgacatgtttcatgagaatgctatgctacagactgaaaataataacctgcgtgtaagaattaaagccatgcaagagacggttgatgcattgaggtccagaattacacagcttgttagtgatcaggccaaccatgttcttgccagagcaggtgaaggaaatgaggagattagtaatatgattcatagttatataaaagaaatcgaagatctcagggcaaaattattagaaagtgaagcagtgaatgagaaccttcgaaaaaacttgacaagagccacagcaagagcgccatatttcagcggatcatcaactttttctcctaccatactatcctcagacaaagaaaccattgaaattatagacctagcaaaaaaagatttagagaagttgaaaagaaaagaaaagaggaagaaaaaaagtgtggctggtaaagaggataatacagacactgaccaagagaagaaagaagaaaagggtgtttcggaaagagaaaacaatgaattagaagtggaagaaagtcaagaagtgagtgatcatgaggatgaagaagaggaggaggaggaggaggaagatgacattgatgggggtgaaagttctgatgaatcagattctgaatcagatgaaaaagccaattatcaagcagacttggcaaacattacttgtgaaattgcaattaagcaaaagctgattgatgaactagaaaacagccagaaaagactgcagactctgaaaaagcagtatgaagagaagctaatgatgctgcaacataaaattcgggatactcagcttgaaagagaccaggtgcttcaaaacttaggctcggtagaatcttactcagaagaaaaagcaaaaaaagttaggtctgaatatgaaaagaaactccaagccatgaacaaagaactgcagagacttcaagcagctcaaaaagaacatgcaaggttgcttaaaaatcagtctcagtatgaaaagcaattgaagaaattgcagcaggatgtgatggaaatgaaaaaaacaaaggttcgcctaatgaaacaaatgaaagaagaacaagagaaagccagactgactgagtctagaagaaacagagagattgctcagttgaaaaaggatcaacgtaaaagagatcatcaacttagacttctggaagcccaaaaaagaaaccaagaagtggttctacgtcgcaaaactgaagaggttacggctcttcgtcggcaagtaagacccatgtcagataaagtggctgggaaagttactcggaagctgagttcatctgatgcacctgctcaggacacaggttccagtgcagctgctgtcgaaacagatgcatcaaggacaggagcccagcagaaaatgagaattcctgtggcgagagtccaggccttaccaacgccggcaacaaatggaaacaggaaaaaatatcagaggaaaggattgactggccgagtgtttatttccaagacagctcgcatgaagtggcagctccttgagcgcagggtcacagacatcatcatgcagaagatgaccatttccaacatggaggcagatatgaatagactcctcaagcaacgggaggaactcacaaaaagacgagagaaactttcaaaaagaagggagaagatagtcaaggagaatggagagggagataaaaatgtggctaatatcaatgaagagatggagtcactgactgctaatatcgattacatcaatgacagtatttctgattgtcaggccaacataatgcagatggaagaagcaaaggaagaaggtgagacattggatgttactgcagtcattaatgcctgcacccttacagaagcccgatacctgctagatcacttcctgtcaatgggcatcaataagggtcttcaggctgcccagaaagaggctcaaattaaagtactggaaggtcgactcaaacaaacagaaataaccagtgctacccaaaaccagctcttattccatatgttgaaagagaaggcagaattaaatcctgagctagatgctttactaggccatgctttacaagatctagatagcgtaccattagaaaatgtagaggatagtactgatgaggatgctcctttaaacagcccaggatcagaaggaagcacgctgtcttcagatctcatgaagctttgtggtgaagtgaaacctaagaacaaggcccgaaggagaaccaccactcagatggaattgctgtatgcagatagcagtgaactagcttcagacactagtacaggagatgcctccttgcctggccctctcacacctgttgcagaagggcaagagattggaatgaatacagagacaagtggtacttctgctagggaaaaagagctctctcccccacctggcttaccttctaagataggcagcatttccaggcagtcatctctatcagaaaaaaaaattccagagccttctcctgtaacaaggagaaaggcatatgagaaagcagaaaaatcaaaggccaaggaacaaaagcactcagattctggaacttcagaggctagtctttcacctccttcttccccaccaagccggccccgtaatgaactgaatgtttttaatcgtcttactgtttctcagggaaacacatcagttcagcaggataagtctgatgaaagtgactcctctctctcggaggtacacagatcctccagaaggggcataatcaacccatttcctgcttcaaaaggaatcagagcttttccacttcagtgtattcacatagctgaagggcatacaaaagctgtgctctgtgtggattctactgatgatctcctcttcactggatcaaaagatcgtacttgtaaagtatggaatctggtgactgggcaggaaataatgtcactggggggtcatcccaacaatgtcgtgtctgtaaaatactgtaattataccagtttggtcttcactgtatcaacatcttatattaaggtgtgggatatcagagattcagcaaagtgcattcgaacactaacgtcttcaggtcaagttactcttggagatgcttgttctgcaagtaccagtcgaacagtagctattccttctggagagaaccagatcaatcaaattgccctaaacccaactggcaccttcctctatgctgcttctggaaatgctgtcaggatgtgggatcttaaaaggtttcagtctacaggaaagttaacaggacacctaggccctgttatgtgccttactgtggatcagatttccagtggacaagatctaatcatcactggctccaaggatcattacatcaaaatgtttgatgttacagaaggagctcttgggactgtgagtcccacccacaattttgaaccccctcattatgatggcatagaagcactaaccattcaaggggataacctatttagtgggtctagagataatggaatcaagaaatgggacttaactcaaaaagaccttcttcagcaagttccaaatgcacataaggattgggtctgtgccctgggagtggtgccagaccacccagttttgctcagtggctgcagagggggcattttgaaagtctggaacatggatacttttatgccagtgggagagatgaagggtcatgatagtcctatcaatgccatatgtgttaattccacccacatttttactgcagctgatgatcgaactgtgagaatttggaaggctcgcaatttgcaagatggtcagatctctgacacaggagatctgggggaagatattgccagtaattaaacatgaatgaagataggttgtaaactgaatgctgtgataatactctgtattctttatggaaaatgttgtcctgtacttactaggcaaaacgtatgaatcggattaactggaaaatatatctgaattcaactgctgactataaatggtattctaataaaattgtgtactatcctgtgtgcttagttttaagatcaaccaatagatatatatcctacaattgatatattgctttattcacacttttattgtggctgaatttttgtgcctatctataaaacacactttcaaattatttgaattaccaagacgtctgcttttgtgacagtcagaaaacacacctggaatacgatgcagcccaccattaactcattcatgtagtttattcaagtgatttatgtatttaaactaaatattgaaaatgttagtcaaattgtggtttgcttgtcaggtatttatatcagtctgtagtggattcccaaatttcaaagctcttttaatgtaatggacaaaaataagatatgagaatattattgatgaattttcataaggtggaattgatcttaatctactaacagagaagggtagacagtttgtgttaaatgttggcatttacttgtattgaccaaagttttgcagctctactatattctgtgctcaggactaaaatgctgttaatttttttttttttttccagtgctgtgcatatattctgtgatgggaaacattgttgatgtcctaacagaaatatattttgatctattttcctatggagttgtttctattatgaccatttaattttgtttttatttaatagtagtatttccttcccttttatctaattttttatatgctgctaaatatattttaaatatactatgtttgcgaaccttggtagctatgatgagagctattatcatctgtggtgggaaaagctatgtaaataggtagattgtatagagagactatcttgtgttgtgcctgtatgaatttttaaaagttgttgactggattttgcaaaaggatgtataatatttctgtctgctcagaatattaatttgtaaattctgcaagtttaatttttatgtagatggtataacatttgaaaatattgtcttatgtgattttttcccctgaaaatatttgcttgtaaatgaaaacttagctagggcttaaataaacatgttgctatgaaattaaaaaaaa

SEQ ID NO: 274 - protein, 1661 aa, Homo sapiens
MLGAPDESSVRVAVRIRPQLAKEKIEGCHICTSVTPGEPQVFLGKDKAFTFDYVFDIDSQQEQIYIQCIEKLIEGCFEGYNATVFAYGQTGAGKTYTMGTGFDVNIVEEELGIISRAVKHLFKSIEEKKHIAIKNGLPAPDFKVNAQFLELYNEEVLDLFDTTRDIDAKSKKSNIRIHEDSTGGIYTVGVTTRTVNTESEMMQCLKLGALSRTTASTQMNVQSSRSHAIFTIHVCQTRVCPQIDADNATDNKIISESAQMNEFETLTAKFHFVDLAGSERLKRTGATGERAKEGISINCGLLALGNVISALGDKSKRATHVPYRDSKLTRLLQDSLGGNSQTIMIACVSPSDRDFMETLNTLKYANRARNIKNKVMVNQDRASQQINALRSEITRLQMELMEYKTGKRIIDEEGVESINDMFHENAMLQTENNNLRVRIKAMQETVDALRSRITQLVSDQANHVLARAGEGNEEISNMIHSYIKEIEDLRAKLLESEAVNENLRKNLTRATARAPYFSGSSTFSPTILSSDKETIEIIDLAKKDLEKLKRKEKRKKKSVAGKEDNTDTDQEKKEEKGVSERENNELEVEESQEVSDHEDEEEEEEEEEDDIDGGESSDESDSESDEKANYQADLANITCEIAIKQKLIDELENSQKRLQTLKKQYEEKLMMLQHKIRDTQLERDQVLQNLGSVESYSEEKAKKVRSEYEKKLQAMNKELQRLQAAQKEHARLLKNQSQYEKQLKKLQQDVMEMKKTKVRLMKQMKEEQEKARLTESRRNREIAQLKKDQRKRDHQLRLLEAQKRNQEVVLRRKTEEVTALRRQVRPMSDKVAGKVTRKLSSSDAPAQDTGSSAAAVETDASRTGAQQKMRIPVARVQALPTPATNGNRKKYQRKGLTGRVFISKTARMKWQLLERRVTDIIMQKMTISNMEADMNRLLKQREELTKRREKLSKRREKIVKENGEGDKNVANINEEMESLTANIDYINDSISDCQANIMQMEEAKEEGETLDVTAVINACTLTEARYLLDHFLSMGINKGLQAAQKEAQIKVLEGRLKQTEITSATQNQLLFHMLKEKAELNPELDALLGHALQDLDSVPLENVEDSTDEDAPLNSPGSEGSTLSSDLMKLCGEVKPKNKARRRTTTQMELLYADSSELASDTSTGDASLPGPLTPVAEGQEIGMNTETSGTSAREKELSPPPGLPSKIGSISRQSSLSEKKIPEPSPVTRRKAYEKAEKSKAKEQKHSDSGTSEASLSPPSSPPSRPRNELNVFNRLTVSQGNTSVQQDKSDESDSSLSEVHRSSRRGIINPFPASKGIRAFPLQCIHIAEGHTKAVLCVDSTDDLLFTGSKDRTCKVWNLVTGQEIMSLGGHPNNVVSVKYCNYTSLVFTVSTSYIKVWDIRDSAKCIRTLTSSGQVTLGDACSASTSRTVAIPSGENQINQIALNPTGTFLYAASGNAVRMWDLKRFQSTGKLTGHLGPVMCLTVDQISSGQDLIITGSKDHYIKMFDVTEGALGTVSPTHNFEPPHYDGIEALTIQGDNLFSGSRDNGIKKWDLTQKDLLQQVPNAHKDWVCALGVVPDHPVLLSGCRGGILKVWNMDTFMPVGEMKGHDSPINAICVNSTHIFTAADDRTVRIWKARNLQDGQISDTGDLGEDIASN

SEQ ID NO: 275 - DNA, 3672 bp, Homo sapiens
  CDS (78)..(1814)
gtcagtcccagcccaagggtagctggaggcgcgcaggccggctccgctccggccccggacgatgcggcgcgcccaggatgctgccgtgcctcgtagtgctgctggcggcgctcctcagcctccgtcttggctcagacgctcatgggacagagctgcccagccctccgtctgtgtggtttgaagcagaatttttccaccacatcctccactggacacccatcccaaatcagtctgaaagtacctgctatgaagtggcgctcctgaggtatggaatagagtcctggaactccatctccaactgtagccagaccctgtcctatgaccttaccgcagtgaccttggacctgtaccacagcaatggctaccgggccagagtgcgggctgtggacggcagccggcactccaactggaccgtcaccaacacccgcttctctgtggatgaagtgactctgacagttggcagtgtgaacctagagatccacaatggcttcatcctcgggaagattcagctacccaggcccaagatggcccccgcaaatgacacatatgaaagcatcttcagtcacttccgagagtatgagattgccattcgcaaggtgccgggaaacttcacgttcacacacaagaaagtaaaacatgaaaacttcagcctcctaacctctggagaagtgggagagttctgtgtccaggtgaaaccatctgtcgcttcccgaagtaacaaggggatgtggtctaaagaggagtgcatctccctcaccaggcagtatttcaccgtgaccaacgtcatcatcttctttgcctttgtcctgctgctctccggagccctcgcctactgcctggccctccagctgtatgtgcggcgccgaaagaagctacccagtgtcctgctcttcaagaagcccagccccttcatcttcatcagccagcgtccctccccagagacccaagacaccatccacccgcttgatgaggaggcctttttgaaggtgtccccagagctgaagaacttggacctgcacggcagcacagacagtggctttggcagcaccaagccatccctgcagactgaagagccccagttcctcctccctgaccctcacccccaggctgacagaacgctgggaaacagggagccccctgtgctgggggacagctgcagtagtggcagcagcaatagcacagacagcgggatctgcctgcaggagcccagcctgagccccagcacagggcccacctgggagcaacaggtggggagcaacagcaggggccaggatgacagtggcattgacttagttcaaaactctgagggccgggctggggacacacagggtggctcggccttgggccaccacagtcccccggagcctgaggtgcctggggaagaagacccagctgctgtggcattccagggttacctgaggcagaccagatgtgctgaagagaaggcaaccaagacaggctgcctggaggaagaatcgcccttgacagatggccttggccccaaattcgggagatgcctggttgatgaggcaggcttgcatccaccagccctggccaagggctatttgaaacaggatcctctagaaatgactctggcttcctcaggggccccaacgggacagtggaaccagcccactgaggaatggtcactcctggccttgagcagctgcagtgacctgggaatatctgactggagctttgcccatgaccttgcccctctaggctgtgtggcagccccaggtggtctcctgggcagctttaactcagacctggtcaccctgcccctcatctctagcctgcagtcaagtgagtgactcgggctgagaggctgcttttgattttagccatgcctgctcctctgcctggaccaggaggagggcccctggggcagaagttaggcacgaggcagtctgggcacttttctgcaagtccactggggctggccccagccaggccctgcagggctggtcagggtgtctggggcaggaggaggccaactcactgaactagtgcagggtatgtgggtggcactgacctgttctgttgactggggccctgcagactctggcagagctgagaagggcagggaccttctccctcctaggaactctttcctgtatcataaaggattatttgctcaggggaaccatggggctttctggagttgtggtgaggccaccaggctgaagtcagctcagacccagacctccctgcttaggccactcgagcatcagagcttccagcaggaggaagggctgtaggaatggaagcttcagggccttgctgctggggtcatttttaggggaaaaaggaggatatgatggtcacatggggaacctcccctcatcgggcctctggggcaggaagcttgtcactggaagatcttaaggtatatattttctggacactcaaacacatcataatggattcactgaggggagacaaagggagccgagaccctggatggggcttccagctcagaacccatccctctggtgggtacctctggcacccatctgcaaatatctccctctctccaacaaatggagtagcatccccctggggcacttgctgaggccaagccactcacatcctcactttgctgccccaccatcttgctgacaacttccagagaagccatggttttttgtattggtcataactcagccctttgggcggcctctgggcttgggcaccagctcatgccagccccagagggtcagggttggaggcctgtgcttgtgtttgctgctaatgtccagctacagacccagaggataagccactgggcactgggctggggtccctgccttgttggtgttcagctgtgtgattttggactagccacttgtcagagggcctcaatctcccatctgtgaaataaggactccacctttaggggaccctccatgtttgctgggtattagccaagctggtcctgggagaatgcagatactgtccgtggactaccaagctggcttgtttcttatgccagaggctaacagatccaatgggagtccatggtgtcatgccaagacagtatcagacacagccccagaagggggcattatgggccctgcctccccataggccatttggactctgccttcaaacaaaggcagttcagtccacaggcatggaagctgtgaggggacaggcctgtgcgtgccatccagagtcatctcagccctgcctttctctggagcattctgaaaacagatattctggcccagggaatccagccatgacccccacccctctgccaaagtactcttaggtgccagtctggtaactgaactccctctggaggcaggcttgagggaggattcctcagggttcccttgaaagctttatttatttattttgttcatttatttattggagaggcagcattgcacagtgaaagaattctggatatctcaggagccccgaaattctagctctgactttgctgtttccagtggtatgaccttggagaagtcacttatcctcttggagcctcagtttcctcatctgcagaataatgactgacttgtctaattcgtagggatgtgaggttctgctgaggaaatgggtatgaatgtgccttgaacacaaagctctgtcaataagtgatacatgttttttattccaataaattgtcaagaccacaggaaaaaaaaaaaaaaaaaa

SEQ ID NO: 276 - protein, 578 aa, Homo sapiens
MLPCLVVLLAALLSLRLGSDAHGTELPSPPSVWFEAEFFHHILHWTPIPNQSESTCYEVALLRYGIESWNSISNCSQTLSYDLTAVTLDLYHSNGYRARVRAVDGSRHSNWTVTNTRFSVDEVTLTVGSVNLEIHNGFILGKIQLPRPKMAPANDTYESIFSHFREYEIAIRKVPGNFTFTHKKVKHENFSLLTSGEVGEFCVQVKPSVASRSNKGMWSKEECISLTRQYFTVTNVIIFFAFVLLLSGALAYCLALQLYVRRRKKLPSVLLFKKPSPFIFISQRPSPETQDTIHPLDEEAFLKVSPELKNLDLHGSTDSGFGSTKPSLQTEEPQFLLPDPHPQADRTLGNREPPVLGDSCSSGSSNSTDSGICLQEPSLSPSTGPTWEQQVGSNSRGQDDSGIDLVQNSEGRAGDTQGGSALGHHSPPEPEVPGEEDPAAVAFQGYLRQTRCAEEKATKTGCLEEESPLTDGLGPKFGRCLVDEAGLHPPALAKGYLKQDPLEMTLASSGAPTGQWNQPTEEWSLLALSSCSDLGISDWSFAHDLAPLGCVAAPGGLLGSFNSDLVTLPLISSLQSSE

SEQ ID NO: 277 - DNA, 1369 bp, Homo sapiens
  CDS (82)..(1083)
attaggtgactggctgaggcggcgccagttggccgggcacggggctgctgtaaggccgaggttgcggcggaagcggagaccatgttccgagcggcggctccggggcagctccggcgggcggcctcattgctacgatttcagagtaccctggtaatagctgagcatgcaaatgattccctagcacccattactttaaataccattactgcagccacacgccttggaggtgaagtgtcctgcttagtagctggaaccaaatgtgacaaggtggcacaagatctctgtaaagtagcaggcatagcaaaagttctggtggctcagcatgatgtgtacaaaggcctacttccagaggaactgacaccattgattttggcaactcagaagcagttcaattacacacacatctgtgctggagcatctgccttcggaaagaaccttttgcccagagtagcagccaaacttgaggttgccccgatttctgacatcattgcaatcaagtcacctgacacatttgtgagaactatttatgcaggaaatgctctatgtacagtgaagtgtgatgagaaagtgaaagtgttttctgtccgtggaacatcctttgatgctgcagcaacaagtggcggtagtgccagttcagaaaaggcatcaagtacttcaccagtggaaatatcagagtggcttgaccagaaattaacaaaaagtgatcgaccagagctaacaggtgccaaagtggtggtatctggtggtcgaggcttgaagagtggagagaactttaagttgttatatgacttggcagatcaactacatgctgcagttggtgcttcccgtgctgctgttgatgctggctttgttcccaatgacatgcaagttggacagacgggaaaaatagtagcaccagaactttatattgctgttggaatatctggagccatccaacatttagctgggatgaaagacagcaagacaattgtggcaattaataaagacccagaagctccaattttccaagtggcagattatggaatagttgcagatttatttaaggtagttcctgaaatgactgagatattgaagaaaaaatgaatcaggatcatgccttaaaaagaaaacttttgttaaagtattccactgaaatcacagatatttgtgggtattataacaatcattggaaagcatggagagctacatttcataatttgagggaaaatttctaacagatgccagaatgcttgtttatgggattgctgtgtttccttttaattatttgtggttccaaacaattattgtttgaactttttaaattctgtactaaaatctataataaagcttttccacagctttaaaactatcagaaaaaaaaaaaaaaaaa

SEQ ID NO: 278 - protein, 333 aa, Homo sapiens
MFRAAAPGQLRRAASLLRFQSTLVIAEHANDSLAPITLNTITAATRLGGEVSCLVAGTKCDKVAQDLCKVAGIAKVLVAQHDVYKGLLPEELTPLILATQKQFNYTHICAGASAFGKNLLPRVAAKLEVAPISDIIAIKSPDTFVRTIYAGNALCTVKCDEKVKVFSVRGTSFDAAATSGGSASSEKASSTSPVEISEWLDQKLTKSDRPELTGAKVVVSGGRGLKSGENFKLLYDLADQLHAAVGASRAAVDAGFVPNDMQVGQTGKIVAPELYIAVGISGAIQHLAGMKDSKTIVAINKDPEAPIFQVADYGIVADLFKVVPEMTEILKKK

SEQ ID NO: 279 - DNA, 2090 bp, Homo sapiens
  CDS (109)..(1113)
gttctgggcctaggggaggcgggccgagggcgtctgagctgaggcccgcgtcgatcctgggttggaggaggtggcggccgctgaggctgcggcgtgaagacggcgggcatggtggggcgggagaaagagctctctatacactttgttcccgggagctgtcggctggtggaggaggaagttaacatccctaataggagggttctggttactggtgccactgggcttcttggcagagctgtacacaaagaatttcagcagaataattggcatgcagttggctgtggtttcagaagagcaagaccaaaatttgaacaggttaatctgttggattctaatgcagttcatcacatcattcatgattttcagccccatgttatagtacattgtgcagcagagagaagaccagatgttgtagaaaatcagccagatgctgcctctcaacttaatgtggatgcttctgggaatttagcaaaggaagcagctgctgttggagcatttctcatctacattagctcagattatgtatttgatggaacaaatccaccttacagagaggaagacataccagctcccctaaatttgtatggcaaaacaaaattagatggagaaaaggctgtcctggagaacaatctaggagctgctgttttgaggattcctattctgtatggggaagttgaaaagctcgaagaaagtgctgtgactgttatgtttgataaagtgcagttcagcaacaagtcagcaaacatggatcactggcagcagaggttccccacacatgtcaaagatgtggccactgtgtgccggcagctagcagagaagagaatgctggatccatcaattaagggaacctttcactggtctggcaatgaacagatgactaagtatgaaatggcatgtgcaattgcagatgccttcaacctccccagcagtcacttaagacctattactgacagccctgtcctaggagcacaacgtccgagaaatgctcagcttgactgctccaaattggagaccttgggcattggccaacgaacaccatttcgaattggaatcaaagaatcactttggcctttcctcattgacaagagatggagacaaacggtctttcattagtttatttgtgttgggttcttttttttttttaaatgaaaagtatagtatgtggcactttttaaagaacaaaggaaatagttttgtatgagtactttaattgtgactcttaggatctttcaggtaaatgatgctcttgcactagtgaaattgtctaaagaaactaaagggcagtcatgccctgtttgcagtaatttttctttttatcattttgtttgtcctggctaaacttggagtttgagtatagtaaattatgatccttaaatatttgagagtcaggatgaagcagatctgctgtagacttttcagatgaaattgttcattctcgtaacctccatattttcaggatttttgaagctgttgaccttttcatgttgattattttaaattgtgtgaaatagtataaaaatcattggtgttcattatttgctttgcctgagctcagatcaaaatgtttgaagaaaggaactttatttttgcaagttacgtacagtttttatgcttgagatatttcaacatgttatgtatattggaacttctacagcttgatgcctcctgcttttatagcagtttatggggagcacttgaaagagcgtgtgtacatgtattttttttctaggcaaacattgaatgcaaacgtgtatttttttaatataaatatataactgtccttttcatcccatgttgccgctaagtgatatttcatatgtgtggttatactcataataatgggccttgtaagtcttttcaccattcatgaataataataaatatgtactgctggcatgtaatgcttagttttcttgtatttacttctttttttaaatgtaaggaccaaacttctaaactaattgttcttttgttgctttaatttttaaaaattacattcttctgatgtaacatgtgatacatacaaaagaatatagtttaatatgtattgaaataaaacacaataaaattaaaaaaaaaaaaaaaaaaaa

SEQ ID NO: 280 - protein, 334 aa, Homo sapiens
MVGREKELSIHFVPGSCRLVEEEVNIPNRRVLVTGATGLLGRAVHKEFQQNNWHAVGCGFRRARPKFEQVNLLDSNAVHHIIHDFQPHVIVHCAAERRPDVVENQPDAASQLNVDASGNLAKEAAAVGAFLIYISSDYVFDGTNPPYREEDIPAPLNLYGKTKLDGEKAVLENNLGAAVLRIPILYGEVEKLEESAVTVMFDKVQFSNKSANMDHWQQRFPTHVKDVATVCRQLAEKRMLDPSIKGTFHWSGNEQMTKYEMACAIADAFNLPSSHLRPITDSPVLGAQRPRNAQLDCSKLETLGIGQRTPFRIGIKESLWPFLIDKRWRQTVFH

SEQ ID NO: 281 - DNA, 2154 bp, Homo sapiens
  CDS (259)..(2016)
gacgcgaggagggaaggggcgtctgtgggcgggacctcccgggattggagtgaagagggtatctgcttgacagtggatccctggggatctacgctgagttcggagatgctccagctcgggccgcccctgtctgagcggagctttgcggcgctgaagcttacaggggaaggaaaagcctcgcccggcgtctgattggcggaaccgcgctgccgcagcctgggattccccagggacccccccggagccgccgcgtctcccatggacttgcccggggactccagcccgcctggccagccgcgtctgtgccgccagcctctgactcgagcattatggggagccaggagcccgaaacggccgaggctgcagctcccgggggccccttctcccctggaaaaggcctctcggcgggtcctggccgtggtgctagaagatgtcatggctgttcacatggtccccgtggtgccctcaaagcagacctccataccacagcaccacagctaccatcaggatcctgtccacaggcagccgcctgcctcgccaccccggcaggccgggtggtcctcgcaggccaggcctcccgaccctctgtgtttgtgtcgcgagcccttgagccgcatccaccggacctcttccaccctgaggcggcgatcaaggacaacccctggcccagaggagggcccttcacaaaaggtggaccgggccccccagcccaccctggtggtgatgctggaagacatcgccagtcctagaccccccgctgagggcttcattgatgagacccccaacttcatcatcccagcacaaagagctgagcccatgaggatagttcgccagccaacgcctccacctggggacctagaacccccattccagccatctgctctgcctgcagaccctctggagagcccaccaacagccccagatcctgctctggagctcccatccaccccaccaccgtccagccttttacgcccccgcctcagtccctggggcttggccccgctcttccgttccgtccgctccaagctggagagctttgctgacatcttcctcacgcccaacaaaaccccacagcccccacccccgtcccccccaatgaagctggagttgaagatcgccatctcagaggccgagcagtctggggctgctgagggcactgcgtctgtcagcccccggcccccaatccgccagtggcgaactcaggaccacaataccccagcacttctccctaagccctctctgggccgaagctactcctgccctgatctggggccccctggcccaggtacctgcacctggccacctgctccaccccaaccaagccgaccacggccgcggcggcacactgtgggtggtggggaaatggcccgagccccgccaccccctcggccctgtctccggaaagaggtcttccctctcggaggagtgggagcctccccttctctcaccacatcttgctcgtccacggcatccacttccttctccgaaccagcagaacccaggttgggttcaaccaaagggaaggagccaagagcctcaaaggaccaggtgctttcagaacctgagaccaagaccatgggaaaggtttctcgattcagaatacgcagaacaccagcccgtcctcagctaaaccttacaccaatgggactgcctcgaccaatcaggttgaacaagaaggagttcagcttggaagaaatttacaccaacaagaattaccaatcacccacaaccaggaggacctttgagaccatctttgaggaaccccgggagcgcaatgggactctgattttcaccagctcaaggaagctccggcgggctgtggaatttcgggacagcagccttcctcgatcacgaagaccgtcccgtggggtccgggctgcagggggcaggactgttcctcccaatgtggcccccagccctgatgtgggccccctgctccagcagcggctggaggagctagatgccttgctcctggaggaagaaacagtagatcgggagcagccccactggacctaggtgccccatctgttggtcatccatcctgaagggacaggaaacctcccaggcagttatttttttttctctatatttctagtaaagttttcgatatgtttctgaaaaaaaaaaaaaaaaaaaaaaaaaaaaaaaaaaaaa

SEQ ID NO: 282 - protein, 585 aa, Homo sapiens
MDLPGDSSPPGQPRLCRQPLTRALWGARSPKRPRLQLPGAPSPLEKASRRVLAVVLEDVMAVHMVPVVPSKQTSIPQHHSYHQDPVHRQPPASPPRQAGWSSQARPPDPLCLCREPLSRIHRTSSTLRRRSRTTPGPEEGPSQKVDRAPQPTLVVMLEDIASPRPPAEGFIDETPNFIIPAQRAEPMRIVRQPTPPPGDLEPPFQPSALPADPLESPPTAPDPALELPSTPPPSSLLRPRLSPWGLAPLFRSVRSKLESFADIFLTPNKTPQPPPPSPPMKLELKIAISEAEQSGAAEGTASVSPRPPIRQWRTQDHNTPALLPKPSLGRSYSCPDLGPPGPGTCTWPPAPPQPSRPRPRRHTVGGGEMARAPPPPRPCLRKEVFPLGGVGASPSLTTSCSSTASTSFSEPAEPRLGSTKGKEPRASKDQVLSEPETKTMGKVSRFRIRRTPARPQLNLTPMGLPRPIRLNKKEFSLEEIYTNKNYQSPTTRRTFETIFEEPRERNGTLIFTSSRKLRRAVEFRDSSLPRSRRPSRGVRAAGGRTVPPNVAPSPDVGPLLQQRLEELDALLLEEETVDREQPHWT

SEQ ID NO: 283 - DNA, 3846 bp, Homo sapiens
  CDS (433)..(1458)
gcagtgcgcacgtcaaagccgggctcgggccgcaagcggggcgaggggttcggggagcggcgcggcctgggagacacagagccttcaggcgccggggcgggggcacaggcgaagactaaggcggcgccgggccccacagcagcagccgcagcccaagcgagcgcagcagcgcggcggcagccgcgggagcccctgggcagccgtccgcccgcgcagccgccgccgccgcgggagcccgtcgccgggagcaggagcgggcggaagacaacggaggggccgagcgtccgagccactccgcggggaccgaacgagcagcccgaagcggcggcggccgaggacggggacagcgacgacgcggaggcagagaagggaacgcccggcccagccccgtagcacaggcggagtgcagcggaggcccctgccgctgccgtcatgccgttcccgtttgggaagtctcacaaatctccagcagacattgtgaagaatctgaaggagagcatggctgttctggaaaagcaagacatttctgataaaaaagcagaaaaggctacagaagaagtttccaaaaatctggttgccatgaaagaaattctgtatggcacaaatgaaaaagagcctcagacagaagcagtagctcaacttgctcaagaactctataatagtgggctccttagcaccctggtagctgatttacagctcattgactttgagggcaaaaaagacgtggctcaaattttcaacaatattctcagaagacaaattggtacgagaactcctactgttgaatacatctgcacccaacagaatattttgttcatgttattgaaagggtatgaatctccagaaatagctctaaattgtggaataatgttaagagaatgcatcagacatgaaccacttgcaaaaatcattttgtggtcggaacagttttatgatttcttcagatatgtcgaaatgtcaacatttgacatagcttcagatgcatttgccacattcaaggatttacttacaagacataaattgctcagtgcagaatttttggaacagcattatgatagatttttcagtgaatatgagaagttacttcattcagaaaattatgtgacaaaaagacagtcactgaagcttctcggtgaactactactagatagacacaacttcacaattatgacaaaatacatcagtaaacctgagaacctcaaattaatgatgaacctgctgcgagacaaaagtcgcaacatccagtttgaggcctttcacgtttttaaggtgtttgtagccaatcctaacaagacgcagcccatcctagacatcctcctcaagaaccaggccaaactcatagagttcctcagcaagtttcagaacgacaggacggaggatgagcagtttaacgacgagaagacctatttagttaaacagatcagggatttgaagagaccagctcagcaagaagcttaatctccaataaacatctatgttaaatccaaattcagcatttgctgttagctattcagcatcaggcactcttattgattcatgaggaacattactgctaatctgctgttaagtgaacggtttttcattttacccttttgtttttcagtccaggttggagatcgtagctgctgctgcttgcacactagggcacatgtgggctttctcttgatctttgtgtcatttcagaattcaaagactgtgctacgggagttctgaacatggctgggttcatgaaggcaaatgtatggatgagagtgtggtttaggaaagagggcactgatatcagattagacctatgtgtttgcacccatctttgttggcgatctgagtgcagtgtggcaagtgcacacctggcatccctgcgtcagatcgcgcaccttcaggtcgcgcaccttcgctgaaggaagatgacgcagagctttatctgaaatcagaggggagctatccaaaatgggagtttgggggcagctaaagttgacatgcgaataaattgatactgaaacttagcaacttcttaaaagtgtaaagaagcctcataagatcataaggaaaatgtatatatgcttttcacagctttctagaattttttgacatttgattttcttgagacttgtaaacctggatatgttgaagggtatttgttaattttacttttcaaagatactttaaaacagtagagctagcaatgacaccttgcatttcatttcaacactgcttcaaggtttcttttgtatataattcttagaatgctcatttcttttaaatggtttaatttgtacagcagaggaatgttattgtagtagtatgtaactattacctaatactgagtttttgcaaaaaacaatgaatgctcatatgtaattgaaatacttcagatcacatgaaaatgctgatttaacatttaagtatcacagcattaaaagaaaaagaaagtaaaccagtcctttgtattcagttacctaatggggtgccatcaataagctgcgatacagccctggagctcagtcagccacaccttcctgcatcctattggccttattcattttaaatgagttaatgaatctgccagatctgtgaatgatagagattatgctaaattaatgctgattctttgtgtgtgtgggaaatctctgtagagcaccttttctttcttagactaagtaacccagtacaatagttgtgaactgaataattaaaactttggcttctcttaggaaaagacgacttcctagtcataggtgtcctatggggaaatttattttttttaatgtcctgttccttaatgctgcaaattatcagtatttataaagtaactgattttgcaccacttttttgttactgtgaccacggcagaacaatgtcttctagactatatctatgtaaagttattagaatggtatctgttcattttagtgatatgaagatcacaactaacaactgacaaatcagagtttgccagttcaaattcagcatggctgcagctgattaagaaattgatatgattattctttgctagcctctcttactaatggaattatatactggccagtaaaatgggcctcccaattgctgtttcagcaggttttaaaccttcaggaacaccagttaggaaaatagctccagaaaatatagatatattttatttttattaaaatggcagtctacatcataattggcatttctcaagactgtctttaccagaatctgtgtgaaataaggcaatctagtctccttgaaaaaaaaatctcttggatgtttaggaaggaagacttggccgtgatgtggtgtcctggctttgtggtgtagtgctgtgtgtatggagttagtgtaaaaacatggattacaccaagtggaagaaacgtcttcttgccaagctcattcttagaacttacacatctagaacagcttccactttggcagtgaggtcgtagccttttaggtggaagaagtgagggtgcagcgtgtcagacacaacattcatgttactcttacattggaatctgaaggtagttcagacttcgtgggttttgtttttaagcaaaacaatgtgaaaacatttaagtttgaaatgttgcatttgaagttatgatcatttaatatattcatattaccaagactattatactggaagtggtttttgtgttataaaggtttaattttacataaggcagttacttaatgtgatttttaacccttaaaaaagtggagatgtatacatttgttaacaatgccatgaaagcattttctttctcctaaggaaaagtgaatttcttatcagaatatctggctggccctgtaatttaaattaaaataaaattttggagaaacagcaaaaaaaaaaaaaaaaaa

SEQ ID NO: 284 - protein, 341 aa, Homo sapiens
MPFPFGKSHKSPADIVKNLKESMAVLEKQDISDKKAEKATEEVSKNLVAMKEILYGTNEKEPQTEAVAQLAQELYNSGLLSTLVADLQLIDFEGKKDVAQIFNNILRRQIGTRTPTVEYICTQQNILFMLLKGYESPEIALNCGIMLRECIRHEPLAKIILWSEQFYDFFRYVEMSTFDIASDAFATFKDLLTRHKLLSAEFLEQHYDRFFSEYEKLLHSENYVTKRQSLKLLGELLLDRHNFTIMTKYISKPENLKLMMNLLRDKSRNIQFEAFHVFKVFVANPNKTQPILDILLKNQAKLIEFLSKFQNDRTEDEQFNDEKTYLVKQIRDLKRPAQQEA

SEQ ID NO: 285 - DNA, 3184 bp, Homo sapiens
  CDS (244)..(2721)
gcctgctgctggccgggcgggggacggggccgggaccggagccggagctgcggggcgcaccggctagacgcgcgcgggattctcggcgggcacgccccgcggaccatgagcgtccccagctccgggagcagccgcggcgcgggcggtgcgaggccggccgcgcggcgcctttgagccccagccggaggtccagagatcctgagagcccgagcgcccagcgccgcgccgggagagttgagaattatggctgcaggaaaatttgcaagccttcccagaaacatgccggtgaatcaccagttccccctggcctcatccatggaccttctgagcagcaggtcccctctcgctgagcatcgcccagatgcctatcaagatgtgtctatacatggcacccttccacggaagaaaaaaggtcctcctcccataaggtcctgtgatgacttcagtcacatgggcaccctcccccactccaaatccccacggcagaactcgcctgtgacccaggatggcatccaggagagcccatggcaggaccggcacggcgaaaccttcaccttcagggatccacatcttctggacccaactgtggaatatgtgaagttctccaaggagaggcacatcatggacaggacccccgagaaactgaagaaggagctggaggaggagctgctcctgagcagcgaggacctgcgcagccatgcctggtaccacggccgcatcccccgacaggtgtctgaaaaccttgtgcagcgagatggtgacttcctagttcgtgactctctgtccagccctgggaactttgtcctgacctgtcagtggaagaacctcgctcagcacttcaaaatcaaccggacagttctgcgactcagcgaggcctacagccgcgtgcagtaccagttcgagatggagagcttcgactccatccccggcctggtgcgctgctacgtgggcaaccgccggcccatctcccagcagagtggcgccatcatcttccagcccatcaacaggacggtgcctctgcggtgcctggaggagcattatggcacctccccaggccaggcccgggagggcagcctcaccaagggaaggccggatgtggccaagaggctgagcctcaccatgggtggcgtccaggcccgagagcagaatttgcccaggggaaacctcctcagaaacaaagaaaagagtggtagccagcccgcctgcctggatcacatgcaggacagaagagccttgtccctcaaagcccaccagtcagagagctacctgccgattggctgcaagctgccacctcagtcctcgggtgtggacacaagcccctgcccaaactcacctgtgttcaggacgggaagcgagcctgccctgagcccagcagtggttcggagggtctcctcagacgccagggctggggaggcgctgaggggatcagacagtcaactgtgccctaagcccccgcctaagccctgcaaggtgccgttcctcaaggttccctcgtctccctctgcctggctcaactcagaggccaactactgtgaactgaacccagcgtttgccacaggctgcggcaggggagcaaagctaccctcatgtgcccagggaagccacacagaactgctcacagccaagcagaatgaggcgccaggtccccggaactctggcgtcaactacttgatccttgatgatgatgacagggaaagaccttgggaacctgcggcagctcagatggagaaggggcagtgggacaagggcgagtttgtgacgcccctcctggagactgtctcctccttcaggcccaacgagtttgagtcaaagttccttccccctgagaataagcccctggaaacagcaatgttgaaacgtgcaaaagaactgttcaccaacaacgaccccaaggtcatcgcccagcacgtactgagcatggactgcagggttgctaggatacttggagtctctgaagagatgaggaggaacatgggggtgagctcaggcctggaactcattaccttgcctcacggacaccagctgcgcctggacataattgaaagacacaacacaatggccatcggcattgcagtggacattctgggatgcacgggcactttggaggaccgagcggccactctgagtaagatcatccaggtggcggtggaactgaaggattccatgggggacctctattccttctcagctctcatgaaagccctggaaatgccacagatcacaaggttagaaaagacgtggactgctctgcggcaccagtacacccaaactgccattctctatgagaaacagctgaagcccttcagcaaactcctgcatgaaggcagagagtccacatgtgttcccccaaacaatgtatcagtcccactgctgatgccgcttgtgacgttaatggagcgccaggctgtgacttttgaaggaaccgacatgtgggaaaaaaacgaccagagctgtgaaatcatgctgaaccatttggcaacagcgcgattcatggccgaggctgcagacagctaccggatgaatgctgagaggatcctggcaggttttcaaccagatgaagaaatgaatgaaatctgcaagactgaatttcaaatgcgattgctatggggcagcaaaggtgcacaagtcaatcagacagagagatatgagaaattcaaccagattttaactgccctctcgcgtaaattggaacctcctcctgtaaagcaggcagagctttgataactctccagagaacctttagaatatcttttcaagtttccccagcttcatctttgggaaagcttactgtttttgataaagtaataatgtgcaaatctgacaatatacaagcttttagtatccacaggatattaaacgtgtaaattgcacagagcacacttatttatgaattgtctaaagttactactgattttaaaatgaataatttattattaaggtaactactgctaatgttgatcagcaaatttaagagaagacctagctatgttggctggttgctttctattatcatggtatttgaccattttagttttaattccatgtcagataagtgtaaatagaagagtttaaaagcatgaaacatttcagaaggtatcagttatatgatattctttaaacaaatatgaaaaatgtaaatactcatgaatgaaaatacatctttttgtgaaaaaaaaaaaaaaaa

SEQ ID NO: 286 - protein, 825 aa, Homo sapiens
MAAGKFASLPRNMPVNHQFPLASSMDLLSSRSPLAEHRPDAYQDVSIHGTLPRKKKGPPPIRSCDDFSHMGTLPHSKSPRQNSPVTQDGIQESPWQDRHGETFTFRDPHLLDPTVEYVKFSKERHIMDRTPEKLKKELEEELLLSSEDLRSHAWYHGRIPRQVSENLVQRDGDFLVRDSLSSPGNFVLTCQWKNLAQHFKINRTVLRLSEAYSRVQYQFEMESFDSIPGLVRCYVGNRRPISQQSGAIIFQPINRTVPLRCLEEHYGTSPGQAREGSLTKGRPDVAKRLSLTMGGVQAREQNLPRGNLLRNKEKSGSQPACLDHMQDRRALSLKAHQSESYLPIGCKLPPQSSGVDTSPCPNSPVFRTGSEPALSPAVVRRVSSDARAGEALRGSDSQLCPKPPPKPCKVPFLKVPSSPSAWLNSEANYCELNPAFATGCGRGAKLPSCAQGSHTELLTAKQNEAPGPRNSGVNYLILDDDDRERPWEPAAAQMEKGQWDKGEFVTPLLETVSSFRPNEFESKFLPPENKPLETAMLKRAKELFTNNDPKVIAQHVLSMDCRVARILGVSEEMRRNMGVSSGLELITLPHGHQLRLDIIERHNTMAIGIAVDILGCTGTLEDRAATLSKIIQVAVELKDSMGDLYSFSALMKALEMPQITRLEKTWTALRHQYTQTAILYEKQLKPFSKLLHEGRESTCVPPNNVSVPLLMPLVTLMERQAVTFEGTDMWEKNDQSCEIMLNHLATARFMAEAADSYRMNAERILAGFQPDEEMNEICKTEFQMRLLWGSKGAQVNQTERYEKFNQILTALSRKLEPPPVKQAEL

SEQ ID NO: 287 - DNA, 978 bp, Homo sapiens
  CDS (95)..(649)
actatgccgtcggcgagcgtgatagccaacaggaaccgggagcggggtcccgggactgggaagaaacggcggccgggagggggctccggggaccatggggctcctgaccattctgaagaagatgaagcagaaagagcgggagctgcgactgctcatgcttggcctggacaatgctggaaagacaaccatcctgaagaagttcaatggggaggacatcgacaccatctccccaacgctgggcttcaacatcaagaccctggagcaccgaggattcaagctgaacatctgggatgtgggtggccagaagtccctgcggtcctactggcggaactactttgagagcaccgatggcctcatctgggtagtggacagcgcagaccgccagcgcatgcaggactgccagcgggagctccagagcctgctggtggaggagcgcctggccggagcaaccctcctcatctttgctaataagcaggacctgcctggagcactgtcctctaacgccatccgcgaggtcctggagctggactccatccgcagccaccactggtgcatccagggctgcagcgccgtcaccggggagaacctgctgccgggcatcgactggctcctggatgacatttccagccgcattttcacagctgactgaaccactccagatgccccccacctagcagtccaggtccctcaaccttcaccaaacactacccatggggggttgggagtcagccggccaaactaacactccccctcctccaccccagcctgctgctgctactgctgcccgctgctgctctgtggccacccggctcccatggcgggagggctgtgccctggctgtctctctggctcctgacctggcctttggctaccataccaagaagagagggctgggcggggaggagctgctactgctgctaccgaggctgtgggcctcatccttcactcagttgtgaaataaaccgctccttgccccga

SEQ ID NO: 288 - protein, 184 aa, Homo sapiens
MGLLTILKKMKQKERELRLLMLGLDNAGKTTILKKFNGEDIDTISPTLGFNIKTLEHRGFKLNIWDVGGQKSLRSYWRNYFESTDGLIWVVDSADRQRMQDCQRELQSLLVEERLAGATLLIFANKQDLPGALSSNAIREVLELDSIRSHHWCIQGCSAVTGENLLPGIDWLLDDISSRIFTAD

SEQ ID NO: 289 - DNA, 1951 bp, Homo sapiens
  CDS (46)..(1335)
ggaagttgccggcggccgcgcggcctcccgggcgggcctacagccatgtcccgggacccggggtcgggcggctgggaggaggccccgcgcgcagctgccgcgctctgcaccctgtaccacgaggccggacagcggctgcgccgcctgcaggaccagctcgctgcccgcgacgccctcatcgctcgcctccgcgcccgcctggccgcgctggagggggacgccgcgccgtccctagtggacgcgctgctggagcaggttgcgcgcttccgggagcagctgcgaaggcaggagggcggcgccgccgaggcccagatgcgccaggaaattgagaggctgactgagcgactagaagaaaaagagagggagatgcagcagctgctgagccagccccaacacgagcgagagaaggaagtcgtcctgctacggaggagcatggcagaaggggagcgcgcccgggccgccagtgacgtcctgtgccgctccttggccaacgagacccatcagctgcggaggacgctgaccgccaccgcccacatgtgtcagcatctggccaagtgtctggatgaacgacagcatgcacaaaggaatgtgggggagagaagtcctgaccagtcggaacacacagatgggcacacctctgtccagagtgttattgagaagttgcaggaagaaaatcgactgttaaaacagaaggtgactcacgttgaagacctcaatgccaagtggcagcgctacaacgccagcagggacgaatacgtgagggggctccatgcgcagctcagggggctgcagatcccccacgagcccgagctgatgaggaaggagatctcccggctcaacagacagttggaagagaaaataaatgactgtgccgaagtgaagcaggagctggcggcctccaggacggcccgggatgctgcgttggagcgggtgcagatgctggaacagcagattctcgcttacaaggatgacttcatgtcagaaagggccgatcgggaacgggctcaaagtaggattcaagaactggaggaaaaggtcgcctctttgctgcaccaggtgtcctggagacaggattctcgagagccagacgccggccggattcacgctgggagcaaaactgccaagtatttggccgccgacgcattagagcttatggtgcctggtggctggaggcctgggactgggtcccagcagccagaaccccctgcagagggcgggcatcctggcgcggtccagagaggccagggggaccttcagtgccctcactgcctgcagtgcttcagtgacgagcaaggggaagagctcctcaggcatgtggccgagtgctgccagtgaccgagactcacccgtgcccttgcggcctcctggcccggtgcagctgccctcagggacagggtgggtgctctcagatgccatgggttgagctctactgagagccaaggcccctagaatagttgcggggcactctgatcgttcactttggtccctttggctatggaacaggctgggtcacagggaactgccagtgaggctggaggctggaggtggagatggggtcaggaacatctggcagagggaggtcccagtctgtgtctccatcaggcttaagccagagctatctggtgctggtgtgccagcccctcccccagcctgcctagaaaggggtggctgcctgagggagtcacttgtatggtccccagggtgggagccccatcctgttctatggaataaagcgtcgcctctctgcctcgaaccagtcaaatggagtattgcggctgcacgtcacactagggtggccacccccgccattgcgagccacatgtctgcactgagaaactgcatttcagtagcatttgtcatccagccggaagttaaagcacacttactttattcacctatttttataataaacgttcttgctgctgtgactgcaaaaaaaaaaaaaaaaaaa

SEQ ID NO: 290 - protein, 429 aa, Homo sapiens
MSRDPGSGGWEEAPRAAAALCTLYHEAGQRLRRLQDQLAARDALIARLRARLAALEGDAAPSLVDALLEQVARFREQLRRQEGGAAEAQMRQEIERLTERLEEKEREMQQLLSQPQHEREKEVVLLRRSMAEGERARAASDVLCRSLANETHQLRRTLTATAHMCQHLAKCLDERQHAQRNVGERSPDQSEHTDGHTSVQSVIEKLQEENRLLKQKVTHVEDLNAKWQRYNASRDEYVRGLHAQLRGLQIPHEPELMRKEISRLNRQLEEKINDCAEVKQELAASRTARDAALERVQMLEQQILAYKDDFMSERADRERAQSRIQELEEKVASLLHQVSWRQDSREPDAGRIHAGSKTAKYLAADALELMVPGGWRPGTGSQQPEPPAEGGHPGAVQRGQGDLQCPHCLQCFSDEQGEELLRHVAECCQ

SEQ ID NO: 291 - DNA, 2568 bp, Homo sapiens
  CDS (324)..(2504)
gggaagatacacggtttttaagaaagaacttctaaccccactccaccgcccaacggtcacgtgacgcgcctgcgtcctcgcctcaaggttttttctggtcgcatattggctgttaactcggctacggggtgtagcgaggtgcattccggaagtaggtcctttgacttttgcttcctctacggaggcaagtaacaacccggcggtcgacgcttagcggaagttcgtcaagtcgcagttgcccccgcacagcggatgtgggtcgcctcttaggtgacgctgggaagtgcctgcaaccttcgccgctgccttctggttgaagcactatggagggagagaggaagaacaacaacaaacggtggtatttcactcgagaacagctggaaaatagcccatcccgtcgttttggcgtggacccagataaagaactttcttatcgccagcaggcggccaatctgcttcaggacatggggcagcgtcttaacgtctcacaattgactatcaacactgctatagtatacatgcatcgattctacatgattcagtccttcacacagttccctggaaattctgtggctccagcagccttgtttctagcagctaaagtggaggagcagcccaaaaaattggaacatgtcatcaaggtagcacatacttgtctccatcctcaggaatcccttcctgatactagaagtgaggcttatttgcaacaagttcaagatctggtcattttagaaagcataattttgcagactttaggctttgaactaacaattgatcacccacatactcatgtagtaaagtgcactcaacttgttcgagcaagcaaggacttagcacagacttcttacttcatggcaaccaacagcctgcatttgaccacatttagcctgcagtacacacctcctgtggtggcctgtgtctgcattcacctggcttgcaagtggtccaattgggagatcccagtctcaactgacgggaagcactggtgggagtatgttgacgccactgtgaccttggaacttttagatgaactgacacatgagtttctacagattttggagaaaactcccaacaggctcaaacgcatttggaattggagggcatgcgaggctgccaagaaaacaaaagcagatgaccgaggaacagatgaaaagacttcagagcagacaatcctcaatatgatttcccagagctcttcagacacaaccattgcaggtttaatgagcatgtcaacttctaccacaagtgcagtgccttccctgccagtctccgaagagtcatccagcaacttaaccagtgtggagatgttgccgggcaagcgttggctgtcctcccaaccttctttcaaactagaacctactcagggtcatcggactagtgagaatttagcacttacaggagttgatcattccttaccacaggatggttcaaatgcatttatttcccagaagcagaatagtaagagtgtgccatcagctaaagtgtcactgaaagaataccgcgcgaagcatgcagaagaattggctgcccagaagaggcaactggagaacatggaagccaatgtgaagtcacaatatgcatatgctgcccagaatctcctttctcatcatgatagccattcttcagtcattctaaaaatgcccatagagggttcagaaaaccccgagcggccttttctggaaaaggctgacaaaacagctctcaaaatgagaatcccagtggcaggtggagataaagctgcgtcttcaaaaccagaggagataaaaatgcgcataaaagtccatgctgcagctgataagcacaattctgtagaggacagtgttacaaagagccgagagcacaaagaaaagcacaagactcacccatctaatcatcatcatcatcataatcaccactcacacaagcactctcattcccaacttccagttggtactgggaacaaacgtcctggtgatccaaaacatagtagccagacaagcaacttagcacataaaacctatagcttgtctagttctttttcctcttccagttctactcgtaaaaggggaccctctgaagagactggaggggctgtgtttgatcatccagccaagattgccaagagtactaaatcctcttccctaaatttctccttcccttcacttcctacaatgggtcagatgcctgggcatagctcagacacaagtggcctttccttttcacagcccagctgtaaaactcgtgtccctcattcgaaactggataaagggcccactggggccaatggtcacaacacgacccagacaatagactatcaagacactgtgaatatgcttcactccctgctcagtgcccagggtgttcagcccactcagcccactgcatttgaatttgttcgtccttatagtgactatctgaatcctcggtctggtggaatctcctcgagatctggcaatacagacaaaccccggccaccacctctgccatcagaacctcctccaccacttccaccccttcctaagtaaaaaaagaaaaagaagaggagaaaaaaacttctttaaaaaaacacataatttttctttttttttt

SEQ ID NO: 292 - protein, 726 aa, Homo sapiens
MEGERKNNNKRWYFTREQLENSPSRRFGVDPDKELSYRQQAANLLQDMGQRLNVSQLTINTAIVYMHRFYMIQSFTQFPGNSVAPAALFLAAKVEEQPKKLEHVIKVAHTCLHPQESLPDTRSEAYLQQVQDLVILESIILQTLGFELTIDHPHTHVVKCTQLVRASKDLAQTSYFMATNSLHLTTFSLQYTPPVVACVCIHLACKWSNWEIPVSTDGKHWWEYVDATVTLELLDELTHEFLQILEKTPNRLKRIWNWRACEAAKKTKADDRGTDEKTSEQTILNMISQSSSDTTIAGLMSMSTSTTSAVPSLPVSEESSSNLTSVEMLPGKRWLSSQPSFKLEPTQGHRTSENLALTGVDHSLPQDGSNAFISQKQNSKSVPSAKVSLKEYRAKHAEELAAQKRQLENMEANVKSQYAYAAQNLLSHHDSHSSVILKMPIEGSENPERPFLEKADKTALKMRIPVAGGDKAASSKPEEIKMRIKVHAAADKHNSVEDSVTKSREHKEKHKTHPSNHHHHHNHHSHKHSHSQLPVGTGNKRPGDPKHSSQTSNLAHKTYSLSSSFSSSSSTRKRGPSEETGGAVFDHPAKIAKSTKSSSLNFSFPSLPTMGQMPGHSSDTSGLSFSQPSCKTRVPHSKLDKGPTGANGHNTTQTIDYQDTVNMLHSLLSAQGVQPTQPTAFEFVRPYSDYLNPRSGGISSRSGNTDKPRPPPLPSEPPPPLPPLPK

SEQ ID NO: 293 - DNA, 4045 bp, Homo sapiens
  CDS (132)..(1787)
gcagccagagctcagcagggccctggagagatggccacggtcccagcaccggggaggactggagagcgcgcgctgccaccgccccatgtctcagccagggcttccttcctcggctccaccctgtggatgtaatggcggcccctgctctgtcctggcgtctgcccctcctcatcctcctcctgcccctggctacctcttgggcatctgcagcggtgaatggcacttcccagttcacatgcttctacaactcgagagccaacatctcctgtgtctggagccaagatggggctctgcaggacacttcctgccaagtccatgcctggccggacagacggcggtggaaccaaacctgtgagctgctccccgtgagtcaagcatcctgggcctgcaacctgatcctcggagccccagattctcagaaactgaccacagttgacatcgtcaccctgagggtgctgtgccgtgagggggtgcgatggagggtgatggccatccaggacttcaagccctttgagaaccttcgcctgatggcccccatctccctccaagttgtccacgtggagacccacagatgcaacataagctgggaaatctcccaagcctcccactactttgaaagacacctggagttcgaggcccggacgctgtccccaggccacacctgggaggaggcccccctgctgactctcaagcagaagcaggaatggatctgcctggagacgctcaccccagacacccagtatgagtttcaggtgcgggtcaagcctctgcaaggcgagttcacgacctggagcccctggagccagcccctggccttcaggacaaagcctgcagcccttgggaaggacaccattccgtggctcggccacctcctcgtgggcctcagcggggcttttggcttcatcatcttagtgtacttgctgatcaactgcaggaacaccgggccatggctgaagaaggtcctgaagtgtaacaccccagacccctcgaagttcttttcccagctgagctcagagcatggaggagacgtccagaagtggctctcttcgcccttcccctcatcgtccttcagccctggcggcctggcacctgagatctcgccactagaagtgctggagagggacaaggtgacgcagctgctcctgcagcaggacaaggtgcctgagcccgcatccttaagcagcaaccactcgctgaccagctgcttcaccaaccagggttacttcttcttccacctcccggatgccttggagatagaggcctgccaggtgtactttacttacgacccctactcagaggaagaccctgatgagggtgtggccggggcacccacagggtcttccccccaacccctgcagcctctgtcaggggaggacgacgcctactgcaccttcccctccagggatgacctgctgctcttctcccccagtctcctcggtggccccagccccccaagcactgcccctgggggcagtggggccggtgaagagaggatgcccccttctttgcaagaaagagtccccagagactgggacccccagcccctggggcctcccaccccaggagtcccagacctggtggattttcagccaccccctgagctggtgctgcgagaggctggggaggaggtccctgacgctggccccagggagggagtcagtttcccctggtccaggcctcctgggcagggggagttcagggcccttaatgctcgcctgcccctgaacactgatgcctacttgtccctccaagaactccagggtcaggacccaactcacttggtgtagacagatggccagggtgggaggcaggcagctgcctgctctgcgccgagcctcagaaggaccctgttgagggtcctcagtccactgctgaggacactcagtgtccagttgcagctggacttctccacccggatggcccccacccagtcctgcacacttggtccatccatttccaaacctccactgctgctcccgggtcctgctgcccgagccaggaactgtgtgtgttgcaggggggcagtaactccccaactccctcgttaatcacaggatcccacgaatttaggctcagaagcatcgctcctctccagccctgcagctattcaccaatatcagtcctcgcggctctccagggctccctgccctgacctcttccctgggttttctgccccagcctcctccttccctcccctccccgtccacagggcagcctgagcgtgctttccaaaacccaaatatggccacgctccccctcggttcaaaaccttgcacaggtcccactgccctcagccccacttctcagcctggtacttgtacctccggtgtcgtgtggggacatccccttctgcaatcctccctaccgtcctcctgagccactcagagctccctcacaccccctctgttgcacatgctattccctggggctgctgtgcgctccccctcatctaggtgacaaacttccctgactcttcaagtgccggttttgcttctcctggagggaagcactgcctcccttaatctgccagaaacttctagcgtcagtgctggagggagaagctgtcagggacccagggcgcctggagaaagaggccctgttactattcctttgggatctctgaggcctcagagtgcttggctgctgtatctttaatgctggggcccaagtaagggcacagatccccccacaaagtggatgcctgctgcatcttcccacagtggcttcacagacccacaagagaagctgatggggagtaaaccctggagtccgaggcccaggcagcagccccgcctagtggtgggccctgatgctgccaggcctgggacctcccactgccccctccactggaggggtctcctctgcagctcagggactggcacactggcctccagaagggcagctccacagggcagggcctcattatttttcactgccccagacacagtgcccaacaccccgtcgtataccctggatgaacgaattaattacctggcaccacctcgtctgggctccctgcgcctgacattcacacagagaggcagagtcccgtgcccattaggtctggcatgccccctcctgcaaggggctcaaccccctaccccgacccctccacgtatctttcctaggcagatcacgttgcaatggctcaaacaacattccaccccagcaggacagtgaccccagtcccagctaactctgacctgggagccctcaggcacctgcacttacaggccttgctcacagctgattgggcacctgaccacacgcccccacaggctctgaccagcagcctatgagggggtttggcaccaagctctgtccaatcaggtaggctgggcctgaactagccaatcagatcaactctgtcttgggcgtttgaactcagggagggaggcccttgggagcaggtgcttgtggacaaggctccacaagcgttgagccttggaaaggtagacaagcgttgagccactaagcagaggaccttgggttcccaatacaaaaatacctactgctgagagggctgctgaccatttggtcaggattcctgttgcctttatatccaaaataaactcccctttcttgaggttgtctgagtcttgggtctatgccttgaaaaaagctgaattattggacagtctcacctcctgccatagggtcctgaatgtttcagaccacaaggggctccacacctttgctgtgtgttctggggcaacctactaatcctctctgcaagtcggtctccttatccccccaaatggaaattgtatttgccttctccactttgggaggctcccacttcttgggagggttacattttttaagtcttaatcatttgtgacatatgtatctatacatccgtatcttttaatgatccgtgtgtaccatctttgtgattatttccttaatattttttctttaagtcagttcattttcgttgaaatacatttatttaaagaaaaatctttgttactctgtaaatgaaaaaacccattttcgctataaataaaaggtaactgtacaaaataagtacaatgcaacaaaa

SEQ ID NO: 294 - protein, 551 aa, Homo sapiens
MAAPALSWRLPLLILLLPLATSWASAAVNGTSQFTCFYNSRANISCVWSQDGALQDTSCQVHAWPDRRRWNQTCELLPVSQASWACNLILGAPDSQKLTTVDIVTLRVLCREGVRWRVMAIQDFKPFENLRLMAPISLQVVHVETHRCNISWEISQASHYFERHLEFEARTLSPGHTWEEAPLLTLKQKQEWICLETLTPDTQYEFQVRVKPLQGEFTTWSPWSQPLAFRTKPAALGKDTIPWLGHLLVGLSGAFGFIILVYLLINCRNTGPWLKKVLKCNTPDPSKFFSQLSSEHGGDVQKWLSSPFPSSSFSPGGLAPEISPLEVLERDKVTQLLLQQDKVPEPASLSSNHSLTSCFTNQGYFFFHLPDALEIEACQVYFTYDPYSEEDPDEGVAGAPTGSSPQPLQPLSGEDDAYCTFPSRDDLLLFSPSLLGGPSPPSTAPGGSGAGEERMPPSLQERVPRDWDPQPLGPPTPGVPDLVDFQPPPELVLREAGEEVPDAGPREGVSFPWSRPPGQGEFRALNARLPLNTDAYLSLQELQGQDPTHLV

SEQ ID NO: 295 - DNA, 820 bp, Homo sapiens
  CDS (255)..(524)
gggagagcctggggccgggccgtgtggatgccatccccgagcgcggttcgcgctcggctgaggcgctggacaagtggcttgggctcccgcgcctcagtttctctctgtggcgccgcctacctcacagacttgtgagcactcactgacgtgggtagcgcccagggcctgcggggcgcaggagagctggagtcaggcggagaccgcaggctgaccccgcagcggccgggctgtcgcggcccccacctcaggtaaccatgtgcgaccgaaaggccgtgatcaaaaatgcggacatgtcggaagagatgcaacaggactcggtggagtgcgctactcaggcgctggagaaatacaacatagagaaggacattgcggctcatatcaagaaggaatttgacaagaagtacaatcccacctggcattgcatcgtggggaggaacttcggtagttatgtgacacatgaaaccaaacacttcatctacttctacctgggccaagtggccattcttctgttcaaatctggttaaaagcatggactgtgccacacacccagtgatccatccaaaaacaaggactgcagcctaaattccaaataccagagactgaaattttcagccttgctaagggaacatctcgatgtttgaacctttgttgtgttttgtacagggcattctctgtactagtttgtcgtggttataaaacaattagcagaatagcctacatttgtatttattttctattccatacttctgcccacgttgttttctctcaaaatccattcctttaaaaaataaatctgatgcagatgtgtaaaaaaaaaaaa

SEQ ID NO: 296 - protein, 89 aa, Homo sapiens
MCDRKAVIKNADMSEEMQQDSVECATQALEKYNIEKDIAAHIKKEFDKKYNPTWHCIVGRNFGSYVTHETKHFIYFYLGQVAILLFKSG

SEQ ID NO: 297 - DNA, 3912 bp, Homo sapiens
  CDS (50)..(3535)
ctgtgctctgtccccaaccttccacttcccctcaacgcgctgctcagggatgaccttcggcactgtgcttcttctgagtgtcctggcttcttatcatggattcaacctggatgtggaggagcctacgatcttccaggaggatgcaggcggctttgggcagagcgtggtgcagttcggtggatctcgactcgtggtgggagcacccctggaggtggtggcggccaaccagacgggacggctgtatgactgcgcagctgccaccggcatgtgccagcccatcccgctgcacatccgccctgaggccgtgaacatgtccttgggcctgaccctggcagcctccaccaacggctcccggctcctggcctgtggcccgaccctgcacagagtctgtggggagaactcatactcaaagggttcctgcctcctgctgggctcgcgctgggagatcatccagacagtccccgacgccacgccagagtgtccacatcaagagatggacatcgtcttcctgattgacggctctggaagcattgaccaaaatgactttaaccagatgaagggctttgtccaagctgtcatgggccagtttgagggcactgacaccctgtttgcactgatgcagtactcaaacctcctgaagatccacttcaccttcacccaattccggaccagcccgagccagcagagcctggtggatcccatcgtccaactgaaaggcctgacgttcacggccacgggcatcctgacagtggtgacacagctatttcatcataagaatggggcccgaaaaagtgccaagaagatcctcattgtcatcacagatgggcagaagtacaaagaccccctggaatacagtgatgtcatcccccaggcagagaaggctggcatcatccgctacgctatcggggtgggacacgctttccagggacccactgccaggcaggagctgaataccatcagctcagcgcctccgcaggaccacgtgttcaaggtggacaactttgcagcccttggcagcatccagaagcagctgcaggagaagatctatgcagttgagggaacccagtccagggcaagcagctccttccagcacgagatgtcccaagaaggcttcagcacagccctcacaatggatggcctcttcctgggggctgtggggagctttagctggtctggaggtgccttcctgtatcccccaaatatgagccccaccttcatcaacatgtctcaggagaatgtggacatgagggactcttacctgggttactccaccgagctagccctgtggaagggggtacagaacctggtcctgggggccccccgctaccagcataccgggaaggctgtcatcttcacccaggtgtccaggcaatggaggaagaaggccgaagtcacagggacgcagatcggctcctacttcggggcctccctctgctccgtggatgtggacagcgatggcagcaccgacctgatcctcattggggccccccattactatgagcagacccgagggggccaggtgtccgtgtgtcccttgcctagggggagggtgcagtggcagtgtgacgctgttctccgtggtgagcagggccacccctggggccgctttggggcagccctgacagtgttgggggatgtgaatgaggacaagctgatagacgtggccattggggccccgggagagcaggagaaccggggtgctgtctacctgtttcacggagcctcagaatccggcatcagcccctcccacagccagcggattgccagctcccagctctcccccaggctgcagtattttgggcaggcgctgagtgggggtcaggacctcacccaggatggactgatggacctggccgtgggggcccggggccaggtgctcctgctcaggagtctgccggtgctgaaagtgggggtggccatgagattcagccctgtggaggtggccaaggctgtgtaccggtgctgggaagagaagcccagtgccctggaagctggggacgccaccgtctgtctcaccatccagaaaagctcactggaccagctaggtgacatccaaagctctgtcaggtttgatctggcactggacccaggtcgtctgacttctcgtgccattttcaatgaaaccaagaaccccactttgactcgaagaaaaaccctgggactggggattcactgtgaaaccctgaagctgcttttgccagattgtgtggaggatgtggtgagccccatcattctgcacctcaacttctcactggtgagagagcccatcccctccccccagaacctgcgtcctgtgctggccgtgggctcacaagacctcttcactgcttctctccccttcgagaagaactgtgggcaagatggcctctgtgaaggggacctgggtgtcaccctcagcttctcaggcctgcagaccctgaccgtggggagctccctggagctcaacgtgattgtgactgtgtggaacgcaggtgaggattcctacggaaccgtggtcagcctctactatccagcagggctgtcgcaccgacgggtgtcaggagcccagaagcagccccatcagagtgccctgcgcctggcatgtgagacagtgcccactgaggatgagggcctaagaagcagccgctgcagtgtcaaccaccccatcttccatgagggctctaacggcaccttcatagtcacattcgatgtctcctacaaggccaccctgggagacaggatgcttatgagggccagtgcaagcagtgagaacaataaggcttcaagcagcaaggccaccttccagctggagctcccggtgaagtatgcagtctacaccatgatcagcaggcaggaagaatccaccaagtacttcaactttgcaacctccgatgagaagaaaatgaaagaggctgagcatcgataccgtgtgaataacctcagccagcgagatctggccatcagcattaacttctgggttcctgtcctgctgaacggggtggctgtgtgggatgtggtcatggaggccccatctcagagtctcccctgtgtttcagagagaaaacctccccagcattctgacttcctgacccagatttcaagaagtcccatgctggactgctccattgctgactgcctgcagttccgctgtgacgtcccctccttcagcgtccaggaggagctggatttcaccctgaagggcaatctcagtttcggctgggtccgcgagacattgcagaagaaggtgttggtcgtgagtgtggctgaaattacgttcgacacatccgtgtactcccagcttccaggacaggaggcatttatgagagctcagatggagatggtgctagaagaagacgaggtctacaatgccattcccatcatcatgggcagctctgtgggggctctgctactgctggcgctcatcacagccacactgtacaagcttggcttcttcaaacgccactacaaggaaatgctggaggacaagcctgaagacactgccacattcagtggggacgatttcagctgtgtggccccaaatgtgcctttgtcctaataatccactttcctgtttatctctaccactgtgggctggacttgcttgcaaccataaatcaacttacatggaaacaacttctgcatagatctgcactggcctaagcaacctaccaggtgctaagcaccttctcggagagatagagattgtaatgtttttacatatctgtccatctttttcagcaatgacccactttttacagaagcaggcatggtgccagcataaattttcatatgcttaagaattgtcacatgaaatgaggatgtttatagcacactttccttgcgtggaagagctataacccagggacctgagtgcctctctgggaatagtcgggggaacctatttgtgggcattgaaaaagttttttcactttc

SEQ ID NO: 298 - protein, 1161 aa, Homo sapiens
MTFGTVLLLSVLASYHGFNLDVEEPTIFQEDAGGFGQSVVQFGGSRLVVGAPLEVVAANQTGRLYDCAAATGMCQPIPLHIRPEAVNMSLGLTLAASTNGSRLLACGPTLHRVCGENSYSKGSCLLLGSRWEIIQTVPDATPECPHQEMDIVFLIDGSGSIDQNDFNQMKGFVQAVMGQFEGTDTLFALMQYSNLLKIHFTFTQFRTSPSQQSLVDPIVQLKGLTFTATGILTVVTQLFHHKNGARKSAKKILIVITDGQKYKDPLEYSDVIPQAEKAGIIRYAIGVGHAFQGPTARQELNTISSAPPQDHVFKVDNFAALGSIQKQLQEKIYAVEGTQSRASSSFQHEMSQEGFSTALTMDGLFLGAVGSFSWSGGAFLYPPNMSPTFINMSQENVDMRDSYLGYSTELALWKGVQNLVLGAPRYQHTGKAVIFTQVSRQWRKKAEVTGTQIGSYFGASLCSVDVDSDGSTDLILIGAPHYYEQTRGGQVSVCPLPRGRVQWQCDAVLRGEQGHPWGRFGAALTVLGDVNEDKLIDVAIGAPGEQENRGAVYLFHGASESGISPSHSQRIASSQLSPRLQYFGQALSGGQDLTQDGLMDLAVGARGQVLLLRSLPVLKVGVAMRFSPVEVAKAVYRCWEEKPSALEAGDATVCLTIQKSSLDQLGDIQSSVRFDLALDPGRLTSRAIFNETKNPTLTRRKTLGLGIHCETLKLLLPDCVEDVVSPIILHLNFSLVREPIPSPQNLRPVLAVGSQDLFTASLPFEKNCGQDGLCEGDLGVTLSFSGLQTLTVGSSLELNVIVTVWNAGEDSYGTVVSLYYPAGLSHRRVSGAQKQPHQSALRLACETVPTEDEGLRSSRCSVNHPIFHEGSNGTFIVTFDVSYKATLGDRMLMRASASSENNKASSSKATFQLELPVKYAVYTMISRQEESTKYFNFATSDEKKMKEAEHRYRVNNLSQRDLAISINFWVPVLLNGVAVWDVVMEAPSQSLPCVSERKPPQHSDFLTQISRSPMLDCSIADCLQFRCDVPSFSVQEELDFTLKGNLSFGWVRETLQKKVLVVSVAEITFDTSVYSQLPGQEAFMRAQMEMVLEEDEVYNAIPIIMGSSVGALLLLALITATLYKLGFFKRHYKEMLEDKPEDTATFSGDDFSCVAPNVPLS

SEQ ID NO: 299 - DNA, 3241 bp, Homo sapiens
  CDS (124)..(2736)
gaggcggcagctgcgcggcggcaccggggcggctgcggcgcgctcggagccccgagggcacgcggcccgggcagctcggtgtgcgcccccgcgagagccggggccccaggcccgccggacaccatgaaccacctgaacgtgctggccaaagcgctctatgacaatgtggccgagtccccggatgagctctccttccgcaagggtgacatcatgacggtgctggagcaggacacgcagggcctggacggctggtggctctgctcgctgcatgggcgccagggcatcgtgcctgggaaccgcctcaagatcttggtgggcatgtatgataagaagccagcagggcctggccccggccctcccgccaccccggcccagcctcagcctggcctccatgccccagcgcctccggcctcccagtacacgcccatgctccccaacacctaccagccccagccagacagcgtctacctggtgcccactcccagcaaggctcagcaaggcctctaccaagtcccgggtcccagccctcagttccagtctcccccagccaagcagacatccaccttctcgaagcagacaccccatcacccgtttcccagcccggccacagacctgtaccaggtgcccccagggcctggaggccctgcccaggatatttaccaggtgccaccttctgccgggatggggcatgacatctaccaggtccccccgtccatggacacacgcagctgggagggcacgaagcccccggcaaaggtggtggtgcccacccgcgtggggcagggctatgtatacgaggccgcccagccggagcaggacgagtacgacatcccgcgacacctgctggccccggggccacaggacatctatgatgtgcccccggttcgggggctgcttcccagccagtatggccaggaggtgtatgacacaccccccatggctgtcaagggtcccaatggccgagacccgttgctggaggtgtatgacgtgccccccagtgtggagaagggcctgccaccgtccaaccaccacgcagtctacgacgttcctccatcggtgagcaaggatgtgcccgatggcccactgctgcgtgaggagacctacgatgtgccccccgccttcgccaaggccaagccctttgacccggcccgcaccccactggtactggctgcgccccctccagactccccgccggccgaggacgtgtatgacgtgccgcccccggctcctgacctctacgacgtgccccctggcttgcggcggcctggcccgggcaccctgtacgatgtgccccgtgaacgggtgcttcctcctgaggtggctgatggtggcgtggtcgacagtggtgtgtatgcggtgcctcccccagctgaacgtgaagccccggcagagggcaagcgcctgtcggcctccagcaccggcagcacacgcagcagccagtctgcgtcctccttggaggtggcagggccgggccgggaacccctggagctggaagttgctgtggaggccctggcacggctgcagcagggtgtgagcgccaccgttgcccaccttctggacctggcaggcagcgccggtgcgactgggagctggcgtagcccctctgagccacaggagccgctggtgcaggacctgcaggctgctgtggccgctgtccagagtgccgtccacgagctgttggagtttgcccgcagcgcggtgggcaatgctgcccacacatctgaccgtgccctgcatgccaagcttagccggcagctgcagaagatggaggacgtgcaccagacgctggtggcacatggtcaggccctcgacgctggccggggaggctctggagccacccttgaggacctggaccggctggtggcctgctcgcgggctgtgcccgaggacgccaagcagctggcctccttcctgcacggcaatgcctcactgctcttcagacggaccaaggccactgccccggggcctgaggggggtggcaccctgcaccccaaccccactgacaagaccagcagcatccagtcacgacccctgccctcaccccctaagttcacctcccaggactcgccagatgggcagtacgagaacagcgaggggggctggatggaggactatgactacgtccacctacaggggaaggaggagtttgagaagacccagaaggagctgctggaaaagggcagcatcacgcggcagggcaagagccagctggagttgcagcagctgaagcagtttgaacgactggaacaggaggtgtcacggcccatagaccacgacctggccaactggacgccagcccaacccctggccccggggcgaacaggcggcctggggccctcggaccggcagctgctgctcttctacctggagcagtgtgaggccaacctgaccacactgaccaacgccgtggacgccttctttaccgccgtggccaccaaccagccgcccaagatctttgtggcgcacagcaagttcgtcatcctcagcgcccacaagctggtgttcatcggggacacactgtcacggcaggccaaggctgctgacgtgcgcagccaggtgacccactacagcaacctgctgtgcgacctcctgcgcggcatcgtggccaccaccaaggccgctgccttgcagtacccatcgccttccgcggcccaggacatggtggagagggtcaaggagctgggccacagcacccagcagttccgccgcgtcctaggccagctggcagccgcctgagggtggtgaccccaggagggaggcaggggaggggtgcggcggtcccagctccctggctcccatgtcaagagtcgctgtgccacaggcttagggacaggaccccagctctgcgtcggtcctggtgccctggatgcccaggaatctgtatatatttatggccgggcagggtgtggggccatgcctcctcaggagccgaagcccaggggccggccagtggccttccccagcatgcaccacgggcccgggttgggtcaccagacggggctggagtgtgagggtcctgcagcctgcaggacctcgtgccaccccgagggctgagcctggtcccacgagggtgccgtgtcccctgacagggccagtgcagtttggtgtgtcctccgccttaccaggagaagaacctgaagaactatttttcgttattggttttccaatcatttgactaagagtctccatttaaataaagtttttaaaaggaagagcaaaaaaaaaaaaaaaaaaaaaaaaa

SEQ ID NO: 300 - protein, 870 aa, Homo sapiens
MNHLNVLAKALYDNVAESPDELSFRKGDIMTVLEQDTQGLDGWWLCSLHGRQGIVPGNRLKILVGMYDKKPAGPGPGPPATPAQPQPGLHAPAPPASQYTPMLPNTYQPQPDSVYLVPTPSKAQQGLYQVPGPSPQFQSPPAKQTSTFSKQTPHHPFPSPATDLYQVPPGPGGPAQDIYQVPPSAGMGHDIYQVPPSMDTRSWEGTKPPAKVVVPTRVGQGYVYEAAQPEQDEYDIPRHLLAPGPQDIYDVPPVRGLLPSQYGQEVYDTPPMAVKGPNGRDPLLEVYDVPPSVEKGLPPSNHHAVYDVPPSVSKDVPDGPLLREETYDVPPAFAKAKPFDPARTPLVLAAPPPDSPPAEDVYDVPPPAPDLYDVPPGLRRPGPGTLYDVPRERVLPPEVADGGVVDSGVYAVPPPAEREAPAEGKRLSASSTGSTRSSQSASSLEVAGPGREPLELEVAVEALARLQQGVSATVAHLLDLAGSAGATGSWRSPSEPQEPLVQDLQAAVAAVQSAVHELLEFARSAVGNAAHTSDRALHAKLSRQLQKMEDVHQTLVAHGQALDAGRGGSGATLEDLDRLVACSRAVPEDAKQLASFLHGNASLLFRRTKATAPGPEGGGTLHPNPTDKTSSIQSRPLPSPPKFTSQDSPDGQYENSEGGWMEDYDYVHLQGKEEFEKTQKELLEKGSITRQGKSQLELQQLKQFERLEQEVSRPIDHDLANWTPAQPLAPGRTGGLGPSDRQLLLFYLEQCEANLTTLTNAVDAFFTAVATNQPPKIFVAHSKFVILSAHKLVFIGDTLSRQAKAADVRSQVTHYSNLLCDLLRGIVATTKAAALQYPSPSAAQDMVERVKELGHSTQQFRRVLGQLAAA

SEQ ID NO: 301 - DNA, 5044 bp, Homo sapiens
  CDS (465)..(3620)
tttccccggaaggaaagcgcagcccgggctgggctcgcaaggtggggaggtgcgggactgggcgtggggaggcggggcgcgcgccgggggacccctccctcctgtcctccttgcggtcgaccggtgcgcttgccagatccgccgcgaagccgggatcgaaggcgacagcgcggccaagggggcgcggccgggacaagctgggggccggttgcccggggcagggacggcggcgacccggccgctggggaggcaggaagatagacccacggatcttaggaagggatccgagagcgcagctgtgaaactggctggggctgggggcacgaaaccgatcagcgctacggagcgcagcggccggcgggttccagtgtcctccggcggcgcggggagcaggtgaacaggtcctcacgcccagctccgcgccctcacgcgctctcgccgggaccccgcttccgctggcagccatgggccccggccccagccgcgcgccccgcgccccacgcctgatgctctgtgcgctcgccttgatggtggcggccggcggctgcgtcgtctccgccttcaacctggatacccgattcctggtagtgaaggaggccgggaacccgggcagcctcttcggctactcggtcgccctccatcggcagacagagcggcagcagcgctacctgctcctggctggtgccccccgggagctcgctgtgcccgatggctacaccaaccggactggtgctgtgtacctgtgcccactcactgcccacaaggatgactgtgagcggatgaacatcacagtgaaaaatgaccctggccatcacattattgaggacatgtggcttggagtgactgtggccagccagggccctgcaggcagagttctggtctgtgcccaccgctacacccaggtgctgtggtcagggtcagaagaccagcggcgcatggtgggcaagtgctacgtgcgaggcaatgacctagagctggactccagtgatgactggcagacctaccacaacgagatgtgcaatagcaacacagactacctggagacgggcatgtgccagctgggcaccagcggtggcttcacccagaacactgtgtacttcggcgcccccggtgcctacaactggaaaggaaacagctacatgattcagcgcaaggagtgggacttatctgagtatagttacaaggacccagaggaccaaggaaacctctatattgggtacacgatgcaggtaggcagcttcatcctgcaccccaaaaacatcaccattgtgacaggtgccccacggcaccgacatatgggcgcggtgttcttgctgagccaggaggcaggcggagacctgcggaggaggcaggtgctggagggctcgcaggtgggcgcctattttggcagcgccattgccctggcagacctgaacaatgatgggtggcaggacctcctggtgggcgccccctactacttcgagaggaaagaggaagtagggggtgccatctatgtcttcatgaaccaggcgggaacctccttccctgctcacccctcactccttcttcatggccccagtggctctgcctttggtttatctgtggccagcattggtgacatcaaccaggatggatttcaggatattgctgtgggagctccgtttgaaggcttgggcaaagtgtacatctatcacagtagctctaaggggctccttagacagccccagcaggtaatccatggagagaagctgggactgcctgggttggccaccttcggctattccctcagtgggcagatggatgtggatgagaacttctacccagaccttctagtgggaagcctgtcagaccacattgtgctgctgcgggcccggcccgtcatcaacatcgtccacaagaccttggtgcccaggccagctgtgctggaccctgcactttgcacggccacctcttgtgtgcaagtggagctgtgctttgcttacaaccagagtgccgggaaccccaactacaggcgaaacatcaccctggcctacactctggaggctgacagggaccgccggccgccccggctccgctttgccggcagtgagtccgctgtcttccacggcttcttctccatgcccgagatgcgctgccagaagctggagctgctcctgatggacaacctccgtgacaaactccgccccatcatcatctccatgaactactctttacctttgcggatgcccgatcgcccccggctggggctgcggtccctggacgcctacccgatcctcaaccaggcacaggctctggagaaccacactgaggtccagttccagaaggagtgcgggcctgacaacaagtgtgagagcaacttgcagatgcgggcagccttcgtgtcagagcagcagcagaagctgagcaggctccagtacagcagagacgtccggaaattgctcctgagcatcaacgtgacgaacacccggacctcggagcgctccggggaggacgcccacgaggcgctgctcaccctggtggtgcctcccgccctgctgctgtcctcagtgcgcccccccggggcctgccaagctaatgagaccatcttttgcgagctggggaaccccttcaaacggaaccagaggatggagctgctcatcgcctttgaggtcatcggggtgaccctgcacacaagggaccttcaggtgcagctgcagctctccacgtcgagtcaccaggacaacctgtggcccatgatcctcactctgctggtggactatacactccagacctcgcttagcatggtaaatcaccggctacaaagcttctttggggggacagtgatgggtgagtctggcatgaaaactgtggaggatgtaggaagccccctcaagtatgaattccaggtgggcccaatgggggaggggctggtgggcctggggaccctggtcctaggtctggagtggccctacgaagtcagcaatggcaagtggctgctgtatcccacggagatcaccgtccatggcaatgggtcctggccctgccgaccacctggagaccttatcaaccctctcaacctcactctttctgaccctggggacaggccatcatccccacagcgcaggcggcgacagctggatccagggggaggccagggccccccacctgtcactctggctgctgccaaaaaagccaagtctgagactgtgctgacctgtgccacagggcgtgcccactgtgtgtggctagagtgccccatccctgatgcccccgttgtcaccaacgtgactgtgaaggcacgagtgtggaacagcaccttcatcgaggattacagagactttgaccgagtccgggtaaatggctgggctaccctattcctccgaaccagcatccccaccatcaacatggagaacaagaccacgtggttctctgtggacattgactcggagctggtggaggagctgccggccgaaatcgagctgtggctggtgctggtggccgtgggtgcagggctgctgctgctggggctgatcatcctcctgctgtggaagtgcggcttcttcaagcgagcccgcactcgcgccctgtatgaagctaagaggcagaaggcggagatgaagagccagccgtcagagacagagaggctgaccgacgactactgagggggcagccccccgcccccggcccacctggtgtgacttctttaagcggacccgctattatcagatcatgcccaagtaccacgcagtgcggatccgggaggaggagcgctacccacctccagggagcaccctgcccaccaagaagcactgggtgaccagctggcagactcgggaccaatactactgacgtcctccctgatcccaccccctcctcccccagtgtcccctttcttcctatttatcataagttatgcctctgacagtccacaggggccaccacctttggctggtagcagcaggctcaggcacatacacctcgtcaagagcatgcacatgctgtctggccctggggatcttcccacaggagggccagcgctgtggaccttacaacgccgagtgcactgcattcctgtgccctagatgcacgtggggcccactgctcgtggactgtgctggtgcatcacggatggtgcatgggctcgccgtgtctcagcctctgccagcgccaaaacaagccaaagagcctcccaccagagccgggaggaaaaggcccctgcaatgtggtgacacctccccctttcacactggatccatcttgagccacagtcactggattgactttgctgtcaaaactactgacagggagcagcccccgggccgctggctggtgggcccccaatgacacccatgccagagaggtggggatcctgcctaaggttgtctacgggggcacttggaggacctggcgtgctcagacccaacagcaaaggaactagaaagaaggacccagaacggcttgctttcctgcatctctgtgaagcctctctccttggccacagactgaactcgcagggaatgcagcaggaaggaacaaagacaggcaaacggcaacgtagcctgggctcactgtgctggggcacggcgggatcctccacagagaggaggggaccaattctggacagacagatgttgggaggatacagaggagatgccacttctcactcaccactaccagccagcctcagaaggccccagagagaccctgcaagaccacggagggagcgacacttgaatgtagaataggcagggggccctgccccaccccatccagccagaccccacgctgaccatgcgtcaggggcctagaggtggagttcttagctatccttggctttcagagccagcctggctctgccccctcccccatgggctgtgtcctaaggcccatttgagaagctgaggctagttccagaaaacctctcctgacccctgcctgttggcaggcccactccccagccccagccccttccatggtactgtagcaggggaattccctccccctccttgtgccttctttgtatataggcttctcacggcgaccaataaacagctcccagtttgtatgcaaaaaaaaaaaaaaaaaa

SEQ ID NO: 302 - protein, 1051 aa, Homo sapiens
MGPGPSRAPRAPRLMLCALALMVAAGGCVVSAFNLDTRFLVVKEAGNPGSLFGYSVALHRQTERQQRYLLLAGAPRELAVPDGYTNRTGAVYLCPLTAHKDDCERMNITVKNDPGHHIIEDMWLGVTVASQGPAGRVLVCAHRYTQVLWSGSEDQRRMVGKCYVRGNDLELDSSDDWQTYHNEMCNSNTDYLETGMCQLGTSGGFTQNTVYFGAPGAYNWKGNSYMIQRKEWDLSEYSYKDPEDQGNLYIGYTMQVGSFILHPKNITIVTGAPRHRHMGAVFLLSQEAGGDLRRRQVLEGSQVGAYFGSAIALADLNNDGWQDLLVGAPYYFERKEEVGGAIYVFMNQAGTSFPAHPSLLLHGPSGSAFGLSVASIGDINQDGFQDIAVGAPFEGLGKVYIYHSSSKGLLRQPQQVIHGEKLGLPGLATFGYSLSGQMDVDENFYPDLLVGSLSDHIVLLRARPVINIVHKTLVPRPAVLDPALCTATSCVQVELCFAYNQSAGNPNYRRNITLAYTLEADRDRRPPRLRFAGSESAVFHGFFSMPEMRCQKLELLLMDNLRDKLRPIIISMNYSLPLRMPDRPRLGLRSLDAYPILNQAQALENHTEVQFQKECGPDNKCESNLQMRAAFVSEQQQKLSRLQYSRDVRKLLLSINVTNTRTSERSGEDAHEALLTLVVPPALLLSSVRPPGACQANETIFCELGNPFKRNQRMELLIAFEVIGVTLHTRDLQVQLQLSTSSHQDNLWPMILTLLVDYTLQTSLSMVNHRLQSFFGGTVMGESGMKTVEDVGSPLKYEFQVGPMGEGLVGLGTLVLGLEWPYEVSNGKWLLYPTEITVHGNGSWPCRPPGDLINPLNLTLSDPGDRPSSPQRRRRQLDPGGGQGPPPVTLAAAKKAKSETVLTCATGRAHCVWLECPIPDAPVVTNVTVKARVWNSTFIEDYRDFDRVRVNGWATLFLRTSIPTINMENKTTWFSVDIDSELVEELPAEIELWLVLVAVGAGLLLLGLIILLLWKCGFFKRARTRALYEAKRQKAEMKSQPSETERLTDDY

SEQ ID NO: 303 - DNA, 1191 bp, Homo sapiens
  CDS (242)..(739)
ggggaggaaggaggtgaggcggtaaggggcgttctctctcttgggtcccgcgcccaacttccgctggcccaaagaaactataattttgaaccaacagacctctgctggcatctgcgattgcatttttcctgttttaacaacggctgtgctagacgaagtggtgaagcccaaagacttatttttgagctcgctgtaagactgagaaatcacgtagtccttcctgaaaccactaagaggaaaaatgtctgtgacactgcatacagatgtaggtgatattaaaattgaagtcttctgtgagaggacacccaaaacatgtgagatggagtctcgctgtgtcccccaggctggagtacaatggcgcgatctcggctcactgcaacctccgcctcctgggttcaagcaagtcttctgcctcagcctcccgagaactggaagaggaggcaacagtatttggggcaagaagtttgaggatgaatacagtgaatatcttaagcacaatgttagaggtgttgtatctatggctaataatggcccgaacaccaatggatctcagttcttcatcacctatggcaaacagccacatttggacatgaaatacaccgtatttggaaaggtaatagatggtctggaaactctagatgagttggagaagttgccagtaaatgagaagacataccgacctcttaatgatgtacacattaaggacataactattcatgccaacccatttgctcagtagctatgatagacctggacaaataacttgacaaattgctggaacacacttattgtggtttacccggttttaattatgtcagagattgcatcatccttctgcttgtttacaactatgatcttctatgaaatggtggtaccaaggggcgcccaacagcttttatccccattcttagagcatattctttattataatgattatccaacatatttctttaattttaatacaaaaaatacatcatttaatttttgttacatatgaacattcatttttaaatgctcagcctcaagtgcaggcatttttgagtggcctgattacatattcctcccacagcaagtccgtatcctggaagtgttattttataataaaatttaaaaagttttaaagaattaaatcgtaggacaaattaattaaaatattgtgtaaaattaccttcaggctaaaaaaaaaaaaaa

SEQ ID NO: 304 - protein, 165 aa, Homo sapiens
MSVTLHTDVGDIKIEVFCERTPKTCEMESRCVPQAGVQWRDLGSLQPPPPGFKQVFCLSLPRTGRGGNSIWGKKFEDEYSEYLKHNVRGVVSMANNGPNTNGSQFFITYGKQPHLDMKYTVFGKVIDGLETLDELEKLPVNEKTYRPLNDVHIKDITIHANPFAQ

SEQ ID NO: 305 - DNA, 5581 bp, Homo sapiens
  CDS (155)..(2275)
gaccgctctttccgggtttgcgagcggaagtggacgaatttgaatcctgtgggccgttgaatgtggctgctcgcggtcggcgtgccccgacgtacagcgggccgggaaaagtggcactgaggctctggaacttctgcccagctctccttgtaaaatgaatgaaagtaaacctggtgactcacagaaccttgcttgtgttttctgtcgaaaacatgatgactgtcctaataaatacggagaaaagaaaactaaggagaaatggaatctcactgtacattactactgtttgttgatgtcaagtggaatttggcagagaggcaaagaagaagaaggagtttatggttttctaatagaagatatcaggaaggaagtgaatagagcttctaaactgaaatgctgtgtttgcaagaaaaatggtgcttcaattggatgtgttgcaccccgatgtaaacgaagttatcatttcccatgtggacttcagagagaatgtattttccagtttactggcaattttgcgtcattttgttgggaccatcgacctgttcaaataattacatctaataattatagagagtccttaccatgcaccatttgcttggaatttattgagcctattccaagttataacatattacgaagtccttgttgtaagaacgcttggtttcatagagactgtttacaggttcaagcaataaatgcgggagtgtttttctttaggtgtacaatatgcaataatagtgacatctttcagaaagagatgttgagaatgggaattcatattcctgaaaaagatgcttcctgggaattagaggaaaacgcttatcaagagcttctgcagcactatgagcgttgtgatgttcgaagatgtcgttgcaaagaagggcgagactataatgcacctgatagcaaatgggaaataaagcgctgtcagtgttgtggttccagtggcacacatttagcctgctcctcattacggtcatgggagcaaaattgggagtgtttggaatgtaggggtattatctacaattcaggagagttccaaaaagccaaaaaacatgtattacccaattctaataatgtggggattacagattgtttgttggaagagtcatcacctaaattacccagacagtcacctggatcccagagtaaagatctactgaggcaaggcagcaaatttagaagaaatgtatcaacactattaatagagttaggattccaaattaaaaaaaaaactaaaagattgtatatcaacaaagccaatatctggaatagtgccttagatgcattcagaaatcgaaactttaatccttcatatgcaattgaagtagcatatgttattgaaaatgataattttggaagtgagcatcctggatcaaagcaagaatttctgagtctcttaatgcaacatcttgagaactcatcattgtttgaagggtccttgtcaaagaacttgtctctaaattctcaagctctgaaagagaatctttactatgaagctggcaaaatgcttgccatttctttagttcacggtggtccttcacctggtttcttttctaaaaccttgtttaactgccttgtttatggaccagaaaatacccagccaattttagatgatgtttcagactttgatgtggcacagattataatcaggataaatactgcaacaactgtagctgacttaaagtcaataataaatgaatgctataactaccttgagttaattggatgtctcagacttataacgacattaagtgataaatatatgttagtaaaagacatacttggctaccatgtaattcagagagtccacacaccctttgaaagttttaagcagggtctgaaaacccttggtgttttggagaaaattcaggcttatccagaagcattttgtagcatcctgtgtcataaacctgagagtctttctgcaaaaatccttagtgagctttttacagtacacacattacctgatgtgaaagctttggggttttggaacagttacttacaggctgttgaagatggtaaatctacaacaacaatggaagacattcttatttttgcaactggttgcagttccattcctccagctggatttaaacccactccttcaattgagtgtctgcatgtggattttcctgttggaaacaagtgtaataactgtttagcaattcccatcaccaatacatataaagagtttcaagaaaatatggacttcaccataagaaacactctaagactagaaaaggaagaaagttctcattacattggacattaaaatgtttccttgaacaaagagaagcttctttaaaagctgctattgataactctcttttatttcactaaccttttcatcatcactttgaacaaactagttagcttcttgacctaataaaatttatgatatgaatataaaggaatattatagccacttaggctaaaaaaaggttttttttgttaaagcatactagtcaaaattggtgataatttctcattttcttgatatagatacttcataaacctcaatataaatactctcaaaatggttgtatggattttatttaggtatggtagcatggttaataaaagtaaaaactgttttactcacattttttgtaaattaggattacatatagaatgccacaatttctctaggtttattcaattttcaaattattcctcattttattttaaagcattaaatagaaaagctaattggttaaattttgttatataaatcagagtcatatattctgggatttgtgttactatgcatacttttctaggatgtcaccaaattagttgtttaaaatgtttttagattactgatttatattaagatgacccacactgcaattagattatgcctagtgggaagtattatataaaaagcagaattaagctgggcacatgtgcttgtaatctcagttataagggaggctgaggtgggagaatcgagatactcagccagcctggcaatgtagcaaagactccatctcaaaaaaaaaaacagaattgcacaaattttctggaatctatggacattccatgagcttaaacacttttgaggtggataacatttagttgaaaatacctaagaaagtgtgtcttctttaaagccttggctttaatcatgggaaattgttgttgttgttgttgttgtttgtatcctatgtttggtattctgtatgtctgatccataatcattttagatatttgaatgatctctgtggattggtaggtttggccatttgaccattatttattatcaagttggttgtatgctaaggtaagttgacgccatagcattatacagttatcttcattgctcttgaatgatatctgttatataagcaatgtataaataaagtaaaaaggatagaatgaaaaacccattctaatgtcaccactcagagataagtaccgtatttctgtgtatccttctataaactctttacttctgtttcctttattttttaactttaataatgctactaaaagacaatacctaaaagtaactgtactaacaaagtgctaacaatgtgaaaatatatagtcccatagtcatgtccccatatttatactcccacagaagaaaaaattggaaaacaaagtctgatgtccttaatctattaacatatttaaatgatataatggttcagttttccatgaaagtaaatcattatgggaagtaaaatgttttaaccatatttttcttaatacacaaagcaggtgtcagctgttgtattctcacccttcttaagaaaaatcattacattattgatattttttaagtaacagaatagatttgaaagagataatatatctcttaataccaaaggaaaactaaaacataattctagtgtacttttctttgttccctcatgtctttttcaatctgtacactaacatacctagcaaatttgttttactttaacttgaaatatttaagaacattaaacaagacatttctttggctttggttgaatttttttgtctcaccaatagtaattgaaagatcaattatcaaagagtttgaatagctaatataaaccccaaagtcaccatacagtttttattccaaatatgttgataaaaagatatttgtttctttatccaccttatttttattacagctaaaaaccaatacaaaccaataaaacctagttaaagctattttctggtttttagttgcaattaatttcccctagggtagaaattaaagctgattaagtcacacacacatactttgttggggtgggggtggcaggtggagaggcagtgtacttgggttagctacaattaaaaacagtatttcaattcctcatttgacttattttatatatagacagggccttagtgataagatggtgtaaataatttaggatattcatgttttaaagtgaagcataaatatttattttgcaaaatgttttctagtttgaaggatgttccattattaccatttttagattaatctgtatggtcaaggaatatcagagaaacctgtaggttatttattttctgcagtgtcattttgtcaaatggttggtattataattgttcttttcttattaattttataaccagtgcataattcttacattagattttaaaaaagaattatgctataaatctttataaatgtgtacatatatttcttaaatattgcaattgcctaaatgttgtatattttaaggctgttttctcttgctcttaatgttgaggaaaactataaattgatctataatgcatctactgttaatggttttggttagtttgatattcattgtttttaaacactttccaatatggaaactttaacaccttttatacaattctctactattcaagatattctttaaaatatctcaccagaaacttacaattttatactttgtaatttttagtttctgtaatttgaggaagtgactttttttgtttgggttaagtaaaaagcctttgattgattaccagcatgagaattcaccttggtttctattttatgcatttgtaaatttttcccctaattatatggaagctattggaacttttgtattcagtgctaaatactaagtcaaggggagtatattaggtaagttttttcagtgactgtgcctttagcattcagtcattataagaaaatgatcagaacaaaatcattacattataaacatgtaattcttttatatagtgattatcatgtactgcattgttactttaaaataagctattaaactagtttttatggttcaagtaatgcaatacaaagtttcatgcttcaagtaatgcaatacaaaacataacccatttaatgatgaattacttgaatgtatattatctgtggtttaggaaaatttggattgtcttgaagagactcagttttcaagttctgattttgaccattatctcttctaattcataaacatatcccagtacctacactatgccaggtattatgctaggtgatcgtttatatgtcagcctatttcccccccttttaaagactgccagattaaccaaaaagcgtgacatttataacaatgttttataaataaataaatgtgtttatgccactaaaggt

SEQ ID NO: 306 - protein, 706 aa, Homo sapiens
MNESKPGDSQNLACVFCRKHDDCPNKYGEKKTKEKWNLTVHYYCLLMSSGIWQRGKEEEGVYGFLIEDIRKEVNRASKLKCCVCKKNGASIGCVAPRCKRSYHFPCGLQRECIFQFTGNFASFCWDHRPVQIITSNNYRESLPCTICLEFIEPIPSYNILRSPCCKNAWFHRDCLQVQAINAGVFFFRCTICNNSDIFQKEMLRMGIHIPEKDASWELEENAYQELLQHYERCDVRRCRCKEGRDYNAPDSKWEIKRCQCCGSSGTHLACSSLRSWEQNWECLECRGIIYNSGEFQKAKKHVLPNSNNVGITDCLLEESSPKLPRQSPGSQSKDLLRQGSKFRRNVSTLLIELGFQIKKKTKRLYINKANIWNSALDAFRNRNFNPSYAIEVAYVIENDNFGSEHPGSKQEFLSLLMQHLENSSLFEGSLSKNLSLNSQALKENLYYEAGKMLAISLVHGGPSPGFFSKTLFNCLVYGPENTQPILDDVSDFDVAQIIIRINTATTVADLKSIINECYNYLELIGCLRLITTLSDKYMLVKDILGYHVIQRVHTPFESFKQGLKTLGVLEKIQAYPEAFCSILCHKPESLSAKILSELFTVHTLPDVKALGFWNSYLQAVEDGKSTTTMEDILIFATGCSSIPPAGFKPTPSIECLHVDFPVGNKCNNCLAIPITNTYKEFQENMDFTIRNTLRLEKEESSHYIGH

SEQ ID NO: 307 - DNA, 890 bp, Homo sapiens
  CDS (181)..(609)
atcttcacccaggctggcccctttggtgaaactacaactcccaggggtctgtgcgcgagaaggcaggcgggtttttctaccggaagtccgctctagctctgggccctacaactgcaccctgagccggagctgcccagtcgccgcgggaccggggccgctggggtctggacgggggtcgccatgatccgctttatcctcatccagaaccgggcaggcaagacgcgcctggccaagtggtacatgcagtttgatgatgatgagaaacagaagctgatcgaggaggtgcatgccgtggtcaccgtccgagacgccaaacacaccaactttgtggagttccggaactttaagatcatttaccgccgctatgctggcctctacttctgcatctgtgtggatgtcaatgacaacaacctggcttacctggaggccattcacaacttcgtggaggtcttaaacgaatatttccacaatgtctgtgaactggacctggtgttcaacttctacaaggtttacacggtcgtggacgagatgttcctggctggcgaaatccgagagaccagccagacgaaggtgctgaaacagctgctgatgctacagtccctggagtgagggcaggcgagccccaccccggccccggcccctcctggactcgcctgctcgcttccccttcccaggcccgtggccaacccagcagtccttccctcagctgcctaggaggaagggacccagctgggtctgggccacaagggaggagactgcaccccactgcctctgggccctggctgtgggcagaggccaccgtgtgtgtcccgagtaaccgtgccgttgtcgtgtgatgccataagcgtctgtgcgtggagtccccaataaacctgtggtcctgcctggcc

SEQ ID NO: 308 - protein, 142 aa, Homo sapiens
MIRFILIQNRAGKTRLAKWYMQFDDDEKQKLIEEVHAVVTVRDAKHTNFVEFRNFKIIYRRYAGLYFCICVDVNDNNLAYLEAIHNFVEVLNEYFHNVCELDLVFNFYKVYTVVDEMFLAGEIRETSQTKVLKQLLMLQSLE

SEQ ID NO: 309 - DNA, 2612 bp, Homo sapiens
  CDS (323)..(1282)
tgcagagggcgcagctccaccgtggtaacttgcaatgtggccgcccctgcgctggcttctttctcctcggccctcggtgaacccagcttttcctttaaagcatagacaaatccttgcttagggtcagccagaccgtgggcttgctttgggctcccgcgtggacgctgaaggctcttcatgatttctcagaaaccttggtgggccacccaaaaagtgtgttggaaatccacggtgatccttaatatggtgatgggattgtccgaaaaggatttcagatgcatgccaggtttccactgattgccagaactcgagatcactacacatggatccccaaaatcaacatggcagtggcagttcgttagttgtgatccagcagccttctttggatagccgtcagagattagactatgagagagagattcagcctactgctattttgtccttagaccagatcaaggccataagaggcagcaatgaatacacagaagggccttcggtggtgaaaagacctgctcctcggacagcaccaagacaagaaaagcatgaaaggactcatgaaatcataccaattaatgtgaataataactacgagcacagacacacaagccacctgggacatgcagtactcccaagtaatgccaggggccccattttgagcagatcaaccagcactggaagtgcagccagctctgggagcaacagcagtgcctcttctgaacagggactgttaggaaggtcaccaccaaccagaccagtccctggtcataggtctgaaagggcaatccggacccagcccaagcaactgattgtggatgacttgaagggttccttgaaagaggacctgacacagcacaagttcatttgtgaacagtgtgggaagtgcaagtgtggagaatgcactgctcccaggaccctaccatcctgtttggcctgtaaccggcagtgcctttgctctgctgagagcatggtggaatatggaacctgcatgtgcttagtcaagggcatcttctaccactgctccaatgacgacgaaggggattcctattcagataatccttgctcctgttcacaatcacactgctgctctagatacctgtgtatgggagccatgtctttatttttaccttgcttactctgttatcctcctgctaaaggatgcctgaagctgtgcaggaggtgttatgactggatccatcgcccagggtgcagatgtaagaactccaacactgtctattgtaagctggagagctgcccctcccggggtcagggtaaaccatcatgatttttggaggtgggttgtacctcctgaacttttagctttcaagttgtggctgttttttgtttttgtttttgtttttgttttctttagaatttttccctgtttcccaccttctcttcccctgttgccaaggtctaactcatggatttttctctttcctcatggatgatcttcagcaagagtggactgggaagctgcacctggctcccactttcaacaagagcctctgccatccacttgagggtattgagagccagtgggcttttgtgtagcctttttgttctgcaagcaactttctaaagttgtgtacatgaacatacacccacatccagactacagtgatttagagttgttttgattgggtaccgtgggagcagggaaattggttttttaaaaagcaactgtttaattgcttaaataagctatgtattaaatctgtctccagttagggctatcttcctagcataggccccttaagtagcatgggggatatattttttgctataacgtaaaaattttcctttaaccactgccctctccttctttctccttcaaggttctttccccctcagttttgttgttgtcttactctggagatgccaagtgtattttttctttctatgtaattttagattcgccttacaatgtaaatcttcacattggagataatattggttggaccttgcccatcttcactctagccttcgtatttgtgaaggactcagccaccttccttcttcaccccatgcttctcaccaaatttttgttgtcattgagggcacttggataactcaagttgatatttatagctgatcaatctatatgtgtcacagaactatgctgcctaaagtgatcttggctccttaatggtccttttggccccttggatagttaacagctgagtaattctaatctcttctgtgttttccttgccttaaccacaaattgtggtgctttttgtatattttatgtataaatcacaaagttgaattctgactatttttaagacaaaagtctgttaaacttttttattgtaaagaatatttattatgcgaatctctattattttatggtatttattgcaaaagactgttgaaatgtactcatgtttgaatataacaaaatatcaatacttaacggaaaataaggtgacacgaagaaagtacatatgttaactataatgcagaaaatatattaattaatgaaaaaaaaaaaaaaaaaaaaaaaaaaaaaaaaaaaaaaaaaaaaaaaaaaaaaaaaaaaaaaaaaaaaaaaaaaaaaaaaaaaaaaaaaaaaaaaaaaaaaaaaaaaaaaaaaaaaaaaaaaaaaaaaa

SEQ ID NO: 310 - protein, 319 aa, Homo sapiens
MDPQNQHGSGSSLVVIQQPSLDSRQRLDYEREIQPTAILSLDQIKAIRGSNEYTEGPSVVKRPAPRTAPRQEKHERTHEIIPINVNNNYEHRHTSHLGHAVLPSNARGPILSRSTSTGSAASSGSNSSASSEQGLLGRSPPTRPVPGHRSERAIRTQPKQLIVDDLKGSLKEDLTQHKFICEQCGKCKCGECTAPRTLPSCLACNRQCLCSAESMVEYGTCMCLVKGIFYHCSNDDEGDSYSDNPCSCSQSHCCSRYLCMGAMSLFLPCLLCYPPAKGCLKLCRRCYDWIHRPGCRCKNSNTVYCKLESCPSRGQGKPS

SEQ ID NO: 311 - DNA, 5850 bp, Homo sapiens
  CDS (30)..(2039)
gagggctccggagcggcgactggcgagccatggcgctggggctgcagcgcgcaaggtcgaccacggagctgcgcaaggaaaagtcccgggatgcggcccgcagccggcgcagccaggagaccgaggtgctgtaccagctggctcacacgctgcccttcgcccgcggcgtcagcgcccacctggacaaggcctctatcatgcgcctcaccatcagctacctgcgcatgcaccgcctctgcgccgcaggggagtggaaccaggtgggagcagggggagaaccactggatgcctgctacctgaaggccctggagggcttcgtcatggtgctcaccgccgagggagacatggcttacctgtcggagaatgtcagcaaacacctgggcctcagtcagctggagctcattggacacagcatctttgatttcatccacccctgtgaccaagaggagcttcaggacgccctgaccccccagcagaccctgtccaggaggaaggtggaggcccccacggagcggtgcttctccttgcgcatgaagagtacactcaccagccgcgggcgcaccctcaacctcaaggcggccacctggaaggtgctgaactgctctggacatatgagggcctacaagccacctgcgcagacttctccagctgggagccctgactcagagcccccgctgcagtgcctggtgctcatctgcgaagccatcccccacccaggcagcctggagcccccactgggccgaggggccttcctcagccgccacagcctggacatgaagttcacctactgtgacgacaggattgcagaagtggctggctatagtcccgatgacctgatcggctgttccgcctacgagtacatccacgcgctggactccgatgcggtcagcaagagcatccacaccttgctgagcaagggccaggcagtaacagggcagtatcgcttcctggcccggagtggtggctacctgtggacccagacccaggccacagtggtgtcagggggacggggcccccagtcggagagtatcgtctgtgtccattttttaatcagccaggtggaagagaccggagtggtgctgtccctggagcaaacggagcaacactctcgcagacccattcagcggggcgccccctctcagaaggacacccctaaccctggggacagccttgacacccctggcccccggatccttgccttcctgcacccgccttccctgagcgaggctgccctggccgctgacccccgccgtttctgcagccctgacctccgtcgcctcctgggacccatcctggatggggcttcagtagcagccactcccagcaccccgctggccacacggcacccccaaagtcctctttcggctgatctcccagatgaactacctgtgggcaccgagaatgtgcacagactcttcacctccgggaaagacactgaggcagtggagacagatttagatatagctcaggatgctgatgctctggatttggagatgctggccccctacatctccatggatgatgacttccagctcaacgccagcgagcagctacccagggcctaccacagacctctgggggctgtcccccggccccgtgctcggagcttccatggcctgtcacctccagcccttgagccctccctgctaccccgctgggggagtgacccccggctgagctgctccagcccttccagaggggacccctcagcatcctctcccatggctggggctcggaagaggaccctggcccagagctcagaggacgaggacgagggagtggagctgctgggagtgagacctcccaaaaggtcccccagcccagaacacgaaaactttctgctctttcctctcagcctgagtttccttctgacaggaggaccagccccagggagcctgcaggaccccagcaccccactcctgaacctgaatgagcccctgggcctgggcccctcactgctctctccgtactcagacgaggacactacccagcccgggggccccttccagccaagggcaggctcagcccaggctgactgagccggctcctctccccatctgccttctcctcccccagaaaggacctcaaccacactccacgccggcagccaacgcacaggatgggggcgccaggagaggggcccctctctcctctatgtaccccctgcccacctcgggcctacctcagccctcacccctctgcctgctcccaatctgggggctctctggggtggtctcagctcagtgacctctgggaggtggtccctggccccctcctccttctctcaggatttctcttggggttctcaatacttggttacctcattatccctttctctgcctctcttggctttattttggggaatcaggggtgaggagggttgggggggtcatatctgtgtttccaggttctggggagaacaatgatccacgggtcaacgtgatcacatttccttctatccttcttgtattattatttttatttttgtcaatttcatgatatggtttttaatcatgatgaattgcctggggtctgtaagaatgtgggactctgatcttccccctcttcaggtgtcagtgcggagaggctctgggccagacctcacccccagtgacttccgattgaggccaaagaccccaagctgcccgccagctctgactgccccttgcgctctgggcttcctgccgcccccagctttgcctggacactgacttcattcatggtcctcctacttcaggggcagcctcccagttcctctgcttccaaactatgcaacctccaacctgctccagttccagactgtataacctctgacctgcactggttctagaccacacaacctccaatgtggtctgctttagatcaccttcttcttcttccttcttcctcttcctcttcctcctgctcctcttcctcttcttcttcttttttttttttgacagagtcttgctctgtcacccaggctggagtgcagtggcgcgatttcagcttactgcagcctccgcgccctgggttcaagtgattctcctgcctcaacttcccaaatagccgggactacgggcatgtgccacattgcccggctaatttttgtatttttagtagagatggggtttcaccacgttgtccagtctggtctcgaactcctgacctcaagtgctccacctgcctcagccttccaaagtgctgggattacaggcgtgagccactgcacccggctagaactcactttctccaaatccctctgcttcgaatttcaccgtcttcagctctttctagttctgggcctcaccagcctctcattctgcctgttttcaaaccttacgatccccaaaaattgtctggttctgggcctctaactccctctggctctatagtctatgactaccagattcttttggttctagaattcactaacttcctctggttctagacctcttcctataaattaatccctcttgttttagatctcacaccctccaacgccctccggttccagatcttatattcagtgatttcctctggttctggaccccacaactccaagcttcctattggttccagttctcctgatcggtaatacatttggttccaaatccagacctcttaatctctctctttttttttttttttttttgagacagagtcccactctgtcacccaggctggagtacagtggctcaatctcggctcactgcagcctccacctcctgggttcaagcaattcttgggcctcagcctcccaaatagctgggattacaggcatgtgccaccacgcccagctaagttttatatttttagtagagacagtgtttcaccatgttggccaggctggtcttgaactcccgacctcaactgatccacccgcctcagcctcccaaagtgctgaaattacaggagtgagcctggccagacttcttaatttctaaatcacttttgttttagaccttatgaggctcagcttattcttctgcagttctctataaccaagactcattttctctcatcaaaaacaagtacagagagtttgatgtgtttatctcttttttcttcctcttcttttttttttttttcttttttgagatggagtctctctctgttgcccaggctggagtataatggtgccatctaggctcactgcaacctccgcctcctgattcaagtgattctcctgcctcagcctcctaaattggtgggattacaggagcccaccaccacatccggctacctttgtgtattttttagtagagacggggttttgccaagttggaggggctggtcttgaactcttgacctcagatgatccacccgcctcagcctcccaaagtgctgggattacaggcataagccaccgtgcccgaccctgtccttatcttataataaccagttcttctagaaccagacgatgctctagttctcctagattctgaacctcatgacctgtaccactcactagttccagactacacaacttctagaaggtgccacctccagggtcctgattcaagatctggtgatctgctgtttctctggttctagaactgacttacaagtgccttctgattctagacctcattccgtaagttcccttggctctagacttcatcatttccagctcctcctcactcaagatctgactccaaattaccctgggtctagaattcagccttcaaatatcttctgattttagactttgccttatacatttctctggttttagatcttaccaccctcaactccttctgattctagatcttatggttcccaaatctctctggttctagaactcagattttaggcttttgtttttccttttttttgttaaaaaaaaaaaaatagagacggggtttcaccatgttgcccaggctggtcgcgaactactgagctcaagcaattctccctccttggcctcaccaaagtgctgggactacaggcatgagccactgagcccagccaggctttttctaattctatgctttattctataaattcctctgcttctaagcctcacagcttccaactgcctttgatttcagatccaaattcctctgattctataattcagcctccaaatgcttctgattctggaatctagacttttccctaaagattcctctggttctgaatcttataacctcaactccctaattccagaccccagcctcctaaatctattctgggcttcccaccccactgaacttacccaattccttctttcagtcttaagttttcccattctaaacccctaccctctaggctgtgctgctcctggacttcatgcctctccattctcattgcctacaatctctgtgccccagaaccccctccacttcccaccccagccctccagacatgcacttaccttgactttaccccacatgtttggggcacctggggctccctcaccccttgggtggtttgcaatctgaagacttctccagccacacaggcacatgcacaggcacggtgctgtctgcatattgccaggtggggagagaagccaggacccctcagctgtctgccaccatctatgtgcctcccttaccccccagctttctttctacagatggtgctactcttggtctcccacaggaaaaggcctccccccttcttagccccatttaccccgtttgtggaaggcactgctcgctctgttttgtcagagagtggcctatccagattggtgctatgggggggtctgacccctccctcctccctctggaggtgatgtgggccctcaatggagggaattgtgctgggctagggaaaggggagggactagactggccacactggctctgaaactcaccaatctctatacaccataaagacctcaccttggtaggcaccaga

SEQ ID NO: 312 - protein, 669 aa, Homo sapiens
MALGLQRARSTTELRKEKSRDAARSRRSQETEVLYQLAHTLPFARGVSAHLDKASIMRLTISYLRMHRLCAAGEWNQVGAGGEPLDACYLKALEGFVMVLTAEGDMAYLSENVSKHLGLSQLELIGHSIFDFIHPCDQEELQDALTPQQTLSRRKVEAPTERCFSLRMKSTLTSRGRTLNLKAATWKVLNCSGHMRAYKPPAQTSPAGSPDSEPPLQCLVLICEAIPHPGSLEPPLGRGAFLSRHSLDMKFTYCDDRIAEVAGYSPDDLIGCSAYEYIHALDSDAVSKSIHTLLSKGQAVTGQYRFLARSGGYLWTQTQATVVSGGRGPQSESIVCVHFLISQVEETGVVLSLEQTEQHSRRPIQRGAPSQKDTPNPGDSLDTPGPRILAFLHPPSLSEAALAADPRRFCSPDLRRLLGPILDGASVAATPSTPLATRHPQSPLSADLPDELPVGTENVHRLFTSGKDTEAVETDLDIAQDADALDLEMLAPYISMDDDFQLNASEQLPRAYHRPLGAVPRPRARSFHGLSPPALEPSLLPRWGSDPRLSCSSPSRGDPSASSPMAGARKRTLAQSSEDEDEGVELLGVRPPKRSPSPEHENFLLFPLSLSFLLTGGPAPGSLQDPSTPLLNLNEPLGLGPSLLSPYSDEDTTQPGGPFQPRAGSAQAD

SEQ ID NO: 313 - DNA, 2358 bp, Homo sapiens
  CDS (129)..(1652)
ggcctcttaggctaggtcagaaaggaggcggaactcggtgatctgactggcggtttcccggccggactgagaaggggagcgcgctgcgcgtcgcaggagtaacctacttggtctcctgctttcgcgacatggccttcaattttggggctccctcgggcacctccggtaccgctgcagccaccgcggcccccgcgggtgggtttggaggatttgggacaacatctacaactgcaggttctgcattcagcttttctgccccaactaacacaggcactactggactctttggtggtactcagaacaaaggttttggatttggtactggttttggcacaacaacgggaactagtactggtttaggtactggtttgggaactggactgggatttggaggatttaatacacagcagcagcagcaaactacattaggtggtctcttcagtcagcctacacaagctcctacccagtccaaccagctgataaatactgcgagtgctctttctgctccaacgctgttgggagatgagagagatgctattttggcaaaatggaatcaactgcaggccttttggggaacaggaaaagggtatttcaacaataatattccgccagtggaattcacacaagaaaatcccttttgccgatttaaggcagtaggttatagttgcatgcccagtaataaagatgaagatgggctagtggttttagttttcaacaaaaaagaaacagagattcgaagccaacaacaacagttggtagaatcattgcataaagttttgggaggaaaccagacccttactgtaaatgtagagggcactaaaacattgccagatgatcagacagaagttgttatttatgttgttgagcgttcgccaaatggtacttcaagaagagttccagctacaacgctatatgcccattttgaacaagccaatataaaaacacaattgcagcaacttggtgtaaccctttctatgactagaacagaactttctcctgcacagatcaaacagcttttacagaatcctcctgctggtgttgatcctattatctgggaacaggccaaggtagataaccctgattctgaaaagttaattcctgtaccaatggtgggttttaaggaacttctccgaagactgaaggttcaagatcagatgactaagcagcatcaaaccagattagatatcatatctgaagatattagtgagctacaaaagaatcaaactacatctgtagccaaaattgcacaatacaagaggaaactcatggatctttcccatagaactttacaggtcctaatcaaacaggaaattcaaaggaagagtggttatgccattcaggctgatgaagagcagttgcgagttcagctggatacgattcagggtgaactaaatgcacctactcagttcaagggccgactaaatgaattgatgtctcaaatcaggatgcagaatcattttggagcagtcagatctgaagaaaggtattacatagatgcagatctgttacgagaaatcaagcagcatttgaaacaacaacaggaaggccttagccatttgattagcatcattaaagacgatctagaagatataaagctggtcgaacatggattgaatgaaaccatccacatcagaggtggtgtctttagttgacagttcacaaacttgtgtaaaggtttgtgaaatgcatcttcttactgcatcagaccttccttaagaatgaaaccgaccacatggagggaaaaagaaaacaattctttcttggattggttttttgagaagtttactgacaaattactgttcatcaaatctgaaatagtcacctcacagctcttcaaagaaaacctttgaaagatttatatctaaaagctgtatttactttaaaagaagtgcataattaccaaaattgtatgtactattgtacatttttacaacagcattttcttaaacataatctgtgtttaatgattattgtccattgagcctgtactctgctttccataccaagtaaatatgaaataatctactttgcacataacagaacaaactataattacttggctgttggagatttgtacttgagtataaatgtacaccagtttttgtatttgtgaactcatctgtgggaggagtaaagaaaatccaaaagcatttaatgttttgtttttgttctataaagatatgaaaatgtatttttatattattttacttatttggaatttacagagcacacctaagcaattaggatataacaaaactacttaaccatttttgcaaccattttgttttttaagcctttttatttctaaaaagatgaaaacttataaataaattcttaatttgtaattacttttaaaaa

SEQ ID NO: 314 - protein, 507 aa, Homo sapiens
MAFNFGAPSGTSGTAAATAAPAGGFGGFGTTSTTAGSAFSFSAPTNTGTTGLFGGTQNKGFGFGTGFGTTTGTSTGLGTGLGTGLGFGGFNTQQQQQTTLGGLFSQPTQAPTQSNQLINTASALSAPTLLGDERDAILAKWNQLQAFWGTGKGYFNNNIPPVEFTQENPFCRFKAVGYSCMPSNKDEDGLVVLVFNKKETEIRSQQQQLVESLHKVLGGNQTLTVNVEGTKTLPDDQTEVVIYVVERSPNGTSRRVPATTLYAHFEQANIKTQLQQLGVTLSMTRTELSPAQIKQLLQNPPAGVDPIIWEQAKVDNPDSEKLIPVPMVGFKELLRRLKVQDQMTKQHQTRLDIISEDISELQKNQTTSVAKIAQYKRKLMDLSHRTLQVLIKQEIQRKSGYAIQADEEQLRVQLDTIQGELNAPTQFKGRLNELMSQIRMQNHFGAVRSEERYYIDADLLREIKQHLKQQQEGLSHLISIIKDDLEDIKLVEHGLNETIHIRGGVFS

SEQ ID NO: 315 - DNA, 3429 bp, Homo sapiens
  CDS (134)..(2734)
ctgggcccgggctggaagccggaagcgagcaaagtggagccgactcgaactccaccgcggaaaagaaagcctcagaacgttcgttcgctgcgtccccagccggggccgagccctccgcgacgccagccgggccatgggggccgcacgcagcccgccgtccgctgtcccggggcccctgctggggctgctcctgctgctcctgggcgtgctggccccgggtggcgcctccctgcgactcctggaccaccgggcgctggtctgctcccagccggggctaaactgcacggtcaagaatagtacctgcctggatgacagctggattcaccctcgaaacctgaccccctcctccccaaaggacctgcagatccagctgcactttgcccacacccaacaaggagacctgttccccgtggctcacatcgaatggacactgcagacagacgccagcatcctgtacctcgagggtgcagagttatctgtcctgcagctgaacaccaatgaacgtttgtgcgtcaggtttgagtttctgtccaaactgaggcatcaccacaggcggtggcgttttaccttcagccactttgtggttgaccctgaccaggaatatgaggtgaccgttcaccacctgcccaagcccatccctgatggggacccaaaccaccagtccaagaatttccttgtgcctgactgtgagcacgccaggatgaaggtaaccacgccatgcatgagctcaggcagcctgtgggaccccaacatcaccgtggagaccctggaggcccaccagctgcgtgtgagcttcaccctgtggaacgaatctacccattaccagatcctgctgaccagttttccgcacatggagaaccacagttgctttgagcacatgcaccacatacctgcgcccagaccagaagagttccaccagcgatccaacgtcacactcactctacgcaaccttaaagggtgctgtcgccaccaagtgcagatccagcccttcttcagcagctgcctcaatgactgcctcagacactccgcgactgtttcctgcccagaaatgccagacactccagaaccaattccggactacatgcccctgtgggtgtactggttcatcacgggcatctccatcctgctggtgggctccgtcatcctgctcatcgtctgcatgacctggaggctagctgggcctggaagtgaaaaatacagtgatgacaccaaatacaccgatggcctgcctgcggctgacctgatccccccaccgctgaagcccaggaaggtctggatcatctactcagccgaccaccccctctacgtggacgtggtcctgaaattcgcccagttcctgctcaccgcctgcggcacggaagtggccctggacctgctggaagagcaggccatctcggaggcaggagtcatgacctgggtgggccgtcagaagcaggagatggtggagagcaactctaagatcatcgtcctgtgctcccgcggcacgcgcgccaagtggcaggcgctcctgggccggggggcgcctgtgcggctgcgctgcgaccacggaaagcccgtgggggacctgttcactgcagccatgaacatgatcctcccggacttcaagaggccagcctgcttcggcacctacgtagtctgctacttcagcgaggtcagctgtgacggcgacgtccccgacctgttcggcgcggcgccgcggtacccgctcatggacaggttcgaggaggtgtacttccgcatccaggacctggagatgttccagccgggccgcatgcaccgcgtaggggagctgtcgggggacaactacctgcggagcccgggcggcaggcagctccgcgccgccctggacaggttccgggactggcaggtccgctgtcccgactggttcgaatgtgagaacctctactcagcagatgaccaggatgccccgtccctggacgaagaggtgtttgaggagccactgctgcctccgggaaccggcatcgtgaagcgggcgcccctggtgcgcgagcctggctcccaggcctgcctggccatagacccgctggtcggggaggaaggaggagcagcagtggcaaagctggaacctcacctgcagccccggggtcagccagcgccgcagcccctccacaccctggtgctcgccgcagaggagggggccctggtggccgcggtggagcctgggcccctggctgacggtgccgcagtccggctggcactggcgggggagggcgaggcctgcccgctgctgggcagcccgggcgctgggcgaaatagcgtcctcttcctccccgtggaccccgaggactcgccccttggcagcagcacccccatggcgtctcctgacctccttccagaggacgtgagggagcacctcgaaggcttgatgctctcgctcttcgagcagagtctgagctgccaggcccaggggggctgcagtagacccgccatggtcctcacagacccacacacgccctacgaggaggagcagcggcagtcagtgcagtctgaccagggctacatctccaggagctccccgcagccccccgagggactcacggaaatggaggaagaggaggaagaggagcaggacccagggaagccggccctgccactctctcccgaggacctggagagcctgaggagcctccagcggcagctgcttttccgccagctgcagaagaactcgggctgggacacgatggggtcagagtcagaggggcccagtgcatgagggcggctccccagggaccgcccagatcccagctttgagagaggagtgtgtgtgcacgtattcatctgtgtgtacatgtctgcatgtgtatatgttcgtgtgtgaaatgtaggctttaaaatgtaaatgtctggattttaatcccaggcatccctcctaacttttctttgtgcagcggtctggttatcgtctatccccaggggaatccacacagcccgctcccaggagctaatggtagagcgtccttgaggctccattattcgttcattcagcatttattgtgcacctactatgtggcgggcatttgggataccaagataaattgcatgcggcatggccccagccatgaaggaacttaaccgctagtgccgaggacacgttaaacgaacaggatgggccgggcacggtggctcacgcctgtaatcccagcacactgggaggccgaggcaggtggatcactctgaggtcaggagtttgagccagcctggccaacatggtgaaaccccatctccactaaaaatagaaaaattagccgggcatggtgacacatgcctgtagtcctagctacttgggaggctgaggcaggagaattgcttgaatctgggaggcagaggttgcagtgagccgagattgtgccattgcactgcagcctggatgacagagcgagactctatctcaaaaaaaaaaaaaaaaaa

SEQ ID NO: 316 - protein, 866 aa, Homo sapiens
MGAARSPPSAVPGPLLGLLLLLLGVLAPGGASLRLLDHRALVCSQPGLNCTVKNSTCLDDSWIHPRNLTPSSPKDLQIQLHFAHTQQGDLFPVAHIEWTLQTDASILYLEGAELSVLQLNTNERLCVRFEFLSKLRHHHRRWRFTFSHFVVDPDQEYEVTVHHLPKPIPDGDPNHQSKNFLVPDCEHARMKVTTPCMSSGSLWDPNITVETLEAHQLRVSFTLWNESTHYQILLTSFPHMENHSCFEHMHHIPAPRPEEFHQRSNVTLTLRNLKGCCRHQVQIQPFFSSCLNDCLRHSATVSCPEMPDTPEPIPDYMPLWVYWFITGISILLVGSVILLIVCMTWRLAGPGSEKYSDDTKYTDGLPAADLIPPPLKPRKVWIIYSADHPLYVDVVLKFAQFLLTACGTEVALDLLEEQAISEAGVMTWVGRQKQEMVESNSKIIVLCSRGTRAKWQALLGRGAPVRLRCDHGKPVGDLFTAAMNMILPDFKRPACFGTYVVCYFSEVSCDGDVPDLFGAAPRYPLMDRFEEVYFRIQDLEMFQPGRMHRVGELSGDNYLRSPGGRQLRAALDRFRDWQVRCPDWFECENLYSADDQDAPSLDEEVFEEPLLPPGTGIVKRAPLVREPGSQACLAIDPLVGEEGGAAVAKLEPHLQPRGQPAPQPLHTLVLAAEEGALVAAVEPGPLADGAAVRLALAGEGEACPLLGSPGAGRNSVLFLPVDPEDSPLGSSTPMASPDLLPEDVREHLEGLMLSLFEQSLSCQAQGGCSRPAMVLTDPHTPYEEEQRQSVQSDQGYISRSSPQPPEGLTEMEEEEEEEQDPGKPALPLSPEDLESLRSLQRQLLFRQLQKNSGWDTMGSESEGPSA

SEQ ID NO: 317 - DNA, 2568 bp, Homo sapiens
  CDS (227)..(1594)
gagagggaggctgctgaacccgagctggtgtgagcttctcttgccgtaagtccacgggtggccaggagcacgtgttagtctggttaagagctctgctcagaagtagccgctgcagctgaaggttttcaggcgggctgaaggctgggccgcttcttcattcatttcagaaacttgaacagtgggccttctacacacgctgtctttgtcagcctcaggcagttcctccatggatgagacacaggggcctctggccatgactgtccatcttcttgccaactctgggcacggctcccttctgcagaggactctggaccagctcctggattgcatttgcccagaggtccggctctttcaggtgtctgaacgggccagtcctgtgaaatactgtgaaaagtcccattccaagcggtcccggtttccagggatgtccgtgttgctcttcctgcacgaaagcccgggagaggataggctatttcgcgtcctggactctctccagcattcgccatggcagtgctaccccacccaggacactcggggaaggctgtgtccctacttttttgccaatcaggagttctacagcctggacagtcagctgcccatctggggggtgaggcaggtgcactgtggctccgagatcctgagggtgacgctgtactgcagttttgataactatgaagacgccatcagactctacgagatgatcctgcagagagaagcgaccttgcaaaagagcaatttttgtttcttcgtgctctatgcctccaagagctttgctctgcagctctccctgaagcagctgcccccgggaatgtcagtggaccccaaagagtcttcggtgctgcagtttaaggttcaagagatcggccagttagtgcctctgctacccaatccatgcatgcctatcagcagcaccaggtggcagactcaggactacgatggcaacaagattctgcttcaggttcagctgaatccagaacttggtgttaagaatggcatcttgggagctggcatgcttcccctgggctccaggctgacttctgtctctgcaaagaggacctcagaacccaggagccagaggaaccagggcaagaggtcccaggggcattctctggagcttcctgagcccagtgggagccccacatcagacaggtgtgctggcacttcgtggaaaagccctggccggtcattccaggtcagcagcccagctatgggtgcccacctgcacctgtcttctcatcaccttgaatccggggccagaatgaaggtcctcaaccgggaaaacagctttcagaagcttgaggccgagacgaatgttgacaccggcttgaccatcataaattctgaacccaggcagacttattttggcggatttccaagggatttacagaccagccagccaccattctgcttgccagcctcttccttgggggtggctacctccaaaaacaacagtgtccttaaggaaagagtctctcctttgccacttgctggccaaagggaccttggtaccaggaagacaatttcagaatgtctccttcatctgcaagttcagggtgaagaaaaagaagaagatgaagaagaattctttatatagcataaaataaatgtggttttctaaaacacaagatcagataaaatgttctagaaatggagtactgacccagaatcagcctgttagttgttcatctgaggggggctgaatgctccccatgcacaatctgtattgattttatttcaaatgttcaaagtctaaaggtgctgggaatgattgtttatttgccgtcacagtcataagagaacacagccaacacacagggaaaaaaaccgaatgcttttgttccgtggagatgcactaacccagctggatgtgttgaatccagcacctatcaggataattgcattgtatgcaaatgaatcggtatgttatacaacactaattagtgtctgtaatttggttttaatttttacttaggttgcatagctcatccccctggacaatatggactgctatttactcttgaatgctttttaattttcatgtgacctcttttggtaactaggccttgttcacataccctccttgtgattttgtctttaaagttgtttgtatctggaatgagtgaaaatgcaaagtgttttgaaaattataaacagttaattttgttttcctgtttaatgagccaaaatactggaagccagaaaatcaggttgaacatgaatgctaggctctagggctttcctgctcatctgcttctcatttgtttctgcactatgtcaaagaggacagtggttcttgttacaaaccaaagaggaacattgagcacagtgggaaaattggactggttgatctggtcactggagcaggacttgggttcttctggccagattttgactcccagattcctttacaaaacgcactcattcattcatttatatatgttcattcaataaacattttttgaatacctaaaaaaaaaaaaaaaaaaaaaaaaaaaaaaaaaaaaaaaaaaaaaaaaaaaaaaaaaaaaaaaaaaaaaaaaaaaaaaaaaaaaaaaaaaaaaaaaaaaa

SEQ ID NO: 318 - protein, 455 aa, Homo sapiens
MDETQGPLAMTVHLLANSGHGSLLQRTLDQLLDCICPEVRLFQVSERASPVKYCEKSHSKRSRFPGMSVLLFLHESPGEDRLFRVLDSLQHSPWQCYPTQDTRGRLCPYFFANQEFYSLDSQLPIWGVRQVHCGSEILRVTLYCSFDNYEDAIRLYEMILQREATLQKSNFCFFVLYASKSFALQLSLKQLPPGMSVDPKESSVLQFKVQEIGQLVPLLPNPCMPISSTRWQTQDYDGNKILLQVQLNPELGVKNGILGAGMLPLGSRLTSVSAKRTSEPRSQRNQGKRSQGHSLELPEPSGSPTSDRCAGTSWKSPGRSFQVSSPAMGAHLHLSSHHLESGARMKVLNRENSFQKLEAETNVDTGLTIINSEPRQTYFGGFPRDLQTSQPPFCLPASSLGVATSKNNSVLKERVSPLPLAGQRDLGTRKTISECLLHLQVQGEEKEEDEEEFFI

SEQ ID NO: 319 - DNA, 1710 bp, Homo sapiens
  CDS (89)..(1090)
cagcagggctcccgcgggcgtcactccggccatcgtccccacctccacctgggccgcccggcaggcaggcgacggaggcccgggagccatgggtgactggggcttcctggagaagttgctggaccaggtccaggagcactcgaccgtggtgggtaagatctggctgacggtgctcttcatcttccgcatcctcatcctgggcctggccggcgagtcagtgtggggtgacgagcaatcagatttcgagtgtaacacggcccagccaggctgcaccaacgtctgctatgaccaggccttccccatctcccacatccgctactgggtgctgcagttcctcttcgtcagcacacccaccctggtctacctgggccatgtcatttacctgtctcggcgagaagagcggctgcggcagaaggagggggagctgcgggcactgccggccaaggacccacaggtggagcgggcgctggcggccgtagagcgtcagatggccaagatctcggtggcagaagatggtcgcctgcgcatccgcggagcactgatgggcacctatgtcgccagtgtgctctgcaagagtgtgctagaggcaggcttcctctatggccagtggcgcctgtacggctggaccatggagcccgtgtttgtgtgccagcgagcaccctgcccctacctcgtggactgctttgtctctcgccccacggagaagaccatcttcatcatcttcatgttggtggttggactcatctccctggtgcttaacctgctggagttggtgcacctgctgtgtcgctgcctcagccgggggatgagggcacggcaaggccaagacgcacccccgacccagggcacctcctcagacccttacacggaccaggtcttcttctacctccccgtgggccaggggccctcatccccaccatgccccacctacaatgggctctcatccagtgagcagaactgggccaacctgaccacagaggagaggctggcgtcttccaggccccctctcttcctggacccaccccctcagaatggccaaaaacccccaagtcgtcccagcagctctgcttctaagaagcagtatgtatagaggcctgtggcttatgtcacccaacagaggggtcctgagaagtctggctgcctgggatgccccctgccccctcctggaaggctctgcagagatgactgggctggggaagcaggtgcttgctggccatggagcctcattgcaagttgttcttgaacacctgaggccttcctggtgcccaccaggcactacggcttcctctccagaatgtggctttgcctgagcacagacagagtcagcatggaatgctcttggccaagggtactgggggccctctggccttttgcagctgatccagaggaacccagagccaacttaccccaacctcaccctatggaacagtcacctgtgcgcaggttgtcctcaaaccctctcctcacaggaaaaggcggattgaggctgctgggtcagccttgatcgcacagacagagcttgtgccggatttggccctgtcaaggggactggtgccttgttttcatcactccttcctagttctactgttcaagcttctgaaataaacaggacttgatcacaaaaaaaaaaaaaaaaaaaaaaaaaaaaaaaaaaaaaaaaaaaaaaaaaaaaaaaaaaaaaaaaaaaaaaaaaaaaaaaaaaaaaaaaaa

SEQ ID NO: 320 - protein, 333 aa, Homo sapiens
MGDWGFLEKLLDQVQEHSTVVGKIWLTVLFIFRILILGLAGESVWGDEQSDFECNTAQPGCTNVCYDQAFPISHIRYWVLQFLFVSTPTLVYLGHVIYLSRREERLRQKEGELRALPAKDPQVERALAAVERQMAKISVAEDGRLRIRGALMGTYVASVLCKSVLEAGFLYGQWRLYGWTMEPVFVCQRAPCPYLVDCFVSRPTEKTIFIIFMLVVGLISLVLNLLELVHLLCRCLSRGMRARQGQDAPPTQGTSSDPYTDQVFFYLPVGQGPSSPPCPTYNGLSSSEQNWANLTTEERLASSRPPLFLDPPPQNGQKPPSRPSSSASKKQYV

SEQ ID NO: 321 - DNA, 4451 bp, Homo sapiens
  CDS (79)..(2634)
gctcatactagggacgggaagtcgcgaccagagccattggagggcgcggggactgcaaccctaatcagcagagcccaaatggcgcagtgggaaatgctgcagaatcttgacagcccctttcaggatcagctgcaccagctttactcgcacagcctcctgcctgtggacattcgacagtacttggctgtctggattgaagaccagaactggcaggaagctgcacttgggagtgatgattccaaggctaccatgctattcttccacttcttggatcagctgaactatgagtgtggccgttgcagccaggacccagagtccttgttgctgcagcacaatttgcggaaattctgccgggacattcagcccttttcccaggatcctacccagttggctgagatgatctttaacctccttctggaagaaaaaagaattttgatccaggctcagagggcccaattggaacaaggagagccagttctcgaaacacctgtggagagccagcaacatgagattgaatcccggatcctggatttaagggctatgatggagaagctggtaaaatccatcagccaactgaaagaccagcaggatgtcttctgcttccgatataagatccaggccaaagggaagacaccctctctggacccccatcagaccaaagagcagaagattctgcaggaaactctcaatgaactggacaaaaggagaaaggaggtgctggatgcctccaaagcactgctaggccgattaactaccctaatcgagctactgctgccaaagttggaggagtggaaggcccagcagcaaaaagcctgcatcagagctcccattgaccacgggttggaacagctggagacatggttcacagctggagcaaagctgttgtttcacctgaggcagctgctgaaggagctgaagggactgagttgcctggttagctatcaggatgaccctctgaccaaaggggtggacctacgcaacgcccaggtcacagagttgctacagcgtctgctccacagagcctttgtggtagaaacccagccctgcatgccccaaactccccatcgacccctcatcctcaagactggcagcaagttcaccgtccgaacaaggctgctggtgagactccaggaaggcaatgagtcactgactgtggaagtctccattgacaggaatcctcctcaattacaaggcttccggaagttcaacattctgacttcaaaccagaaaactttgacccccgagaaggggcagagtcagggtttgatttgggactttggttacctgactctggtggagcaacgttcaggtggttcaggaaagggcagcaataaggggccactaggtgtgacagaggaactgcacatcatcagcttcacggtcaaatatacctaccagggtctgaagcaggagctgaaaacggacaccctccctgtggtgattatttccaacatgaaccagctctcaattgcctgggcttcagttctctggttcaatttgctcagcccaaaccttcagaaccagcagttcttctccaacccccccaaggccccctggagcttgctgggccctgctctcagttggcagttctcctcctatgttggccgaggcctcaactcagaccagctgagcatgctgagaaacaagctgttcgggcagaactgtaggactgaggatccattattgtcctgggctgacttcactaagcgagagagccctcctggcaagttaccattctggacatggctggacaaaattctggagttggtacatgaccacctgaaggatctctggaatgatggacgcatcatgggctttgtgagtcggagccaggagcgccggctgctgaagaagaccatgtctggcacctttctactgcgcttcagtgaatcgtcagaagggggcattacctgctcctgggtggagcaccaggatgatgacaaggtgctcatctactctgtgcaaccgtacacgaaggaggtgctgcagtcactcccgctgactgaaatcatccgccattaccagttgctcactgaggagaatatacctgaaaacccactgcgcttcctctatccccgaatcccccgggatgaagcttttgggtgctactaccaggagaaagttaatctccaggaacggaggaaatacctgaaacacaggctcattgtggtctctaatagacaggtggatgaactgcaacaaccgctggagcttaagccagagccagagctggagtcattagagctggaactagggctggtgccagagccagagctcagcctggacttagagccactgctgaaggcagggctggatctggggccagagctagagtctgtgctggagtccactctggagcctgtgatagagcccacactatgcatggtatcacaaacagtgccagagccagaccaaggacctgtatcacagccagtgccagagccagatttgccctgtgatctgagacatttgaacactgagccaatggaaatcttcagaaactgtgtaaagattgaagaaatcatgccgaatggtgacccactgttggctggccagaacaccgtggatgaggtttacgtctcccgccccagccacttctacactgatggacccttgatgccttctgacttctaggaaccacatttcctctgttcttttcatatctcttgcccttcctactcctcatagcatgatattgttctccaaggatgggaatcaggcatgtgtcccttccaagctgtgttaactgttcaaactcaggcctgtgtgactccattggggtgagaggtgaaagcataacatgggtacagaggggacaacaatgaatcagaacagatgctgagccataggtctaaataggatcctggaggctgcctgctgtgctgggaggtataggggtcctgggggcaggccagggcagttgacaggtacttggagggctcagggcagtggcttctttccagtatggaaggatttcaacattttaatagttggttaggctaaactggtgcatactggcattggcccttggtggggagcacagacacaggataggactccatttctttcttccattccttcatgtctaggataacttgctttcttctttcctttactcctggctcaagccctgaatttcttcttttcctgcaggggttgagagctttctgccttagcctaccatgtgaaactctaccctgaagaaagggatggataggaagtagacctctttttcttaccagtctcctcccctactctgcccctaagctggctgtacctgttcctcccccataaaatgatcctgccaatctaatgtgagtgtgaagctttgcacactagtttatgctacctagtctccactttctcaatgcttaggagacagatcactcctggaggctggggatggtaggattgctggggatttttttttttttaaacagggtctcactctgttgcccaggctagagtgcaatggtgcaatcacagctcactgcagcctcaacctcctgggttcaagcaatcctcctacctcagcctcctgggtagctagcaccatggcatgcgccaccatgccctattttttttttttaaagacagggtcttgctatattgcccaggctggtcttgaactgggctcaagtgatcctcacgccttggcctcccaaagtgctgggattataggcatgagccactgtgcttggccaggatttttttttttttttttttgagatggagtttctctcttgttgtccaggctggagtgcaatggtgtgatctcggctcactgcaacctccgccttccgggttcaagtgactctcctgcctcagcctccccagtagctgggattacagatctgcaccaccatgcccagctaattttgtatttttagtagagacggggtttctccatgttggtcaggctggtctcgaactcctgacctcaagtgatctgtccacctcggcctcccagagtgctgggattacaggcgtgagccactgttcccagcaggaatttcttttttatagtattggataaagtttggtgtttttacagaggagaagcaatgggtcttagctctttctctattatgttatcatcctcccttttttgtacaatatgttgtttacctgaaaggaaggtttctattcgttggttgtggacctggacaaagtccaagtctgtggaacttaaaaccttgaaggtctgtcataggactctggacaatctcacaccttagctattcccagggaaccccagggggcaactgacattgctccaagatgttctcctgatgtagcttgagatataaaggaaaggccctgcacaggtggctgtttcttgtctgttatgtcagaggaacagtcctgttcagaaaggggctcttctgagcagaaatggctaataaactttgtgctgatctggaaaaaaaaaaaaaaaaaaaaaaaaaaaa

SEQ ID NO: 322 - protein, 851 aa, Homo sapiens
MAQWEMLQNLDSPFQDQLHQLYSHSLLPVDIRQYLAVWIEDQNWQEAALGSDDSKATMLFFHFLDQLNYECGRCSQDPESLLLQHNLRKFCRDIQPFSQDPTQLAEMIFNLLLEEKRILIQAQRAQLEQGEPVLETPVESQQHEIESRILDLRAMMEKLVKSISQLKDQQDVFCFRYKIQAKGKTPSLDPHQTKEQKILQETLNELDKRRKEVLDASKALLGRLTTLIELLLPKLEEWKAQQQKACIRAPIDHGLEQLETWFTAGAKLLFHLRQLLKELKGLSCLVSYQDDPLTKGVDLRNAQVTELLQRLLHRAFVVETQPCMPQTPHRPLILKTGSKFTVRTRLLVRLQEGNESLTVEVSIDRNPPQLQGFRKFNILTSNQKTLTPEKGQSQGLIWDFGYLTLVEQRSGGSGKGSNKGPLGVTEELHIISFTVKYTYQGLKQELKTDTLPVVIISNMNQLSIAWASVLWFNLLSPNLQNQQFFSNPPKAPWSLLGPALSWQFSSYVGRGLNSDQLSMLRNKLFGQNCRTEDPLLSWADFTKRESPPGKLPFWTWLDKILELVHDHLKDLWNDGRIMGFVSRSQERRLLKKTMSGTFLLRFSESSEGGITCSWVEHQDDDKVLIYSVQPYTKEVLQSLPLTEIIRHYQLLTEENIPENPLRFLYPRIPRDEAFGCYYQEKVNLQERRKYLKHRLIVVSNRQVDELQQPLELKPEPELESLELELGLVPEPELSLDLEPLLKAGLDLGPELESVLESTLEPVIEPTLCMVSQTVPEPDQGPVSQPVPEPDLPCDLRHLNTEPMEIFRNCVKIEEIMPNGDPLLAGQNTVDEVYVSRPSHFYTDGPLMPSDF

SEQ ID NO: 323 - DNA, 2466 bp, Homo sapiens
  CDS (241)..(1860)
atgttttacggaagccgatagtccttgctcagcggcaccccgtccttccggctctcggctttgccacaaagcttcccgaagacgcggccgctacccggagacgcggtcgccacccagaagcgctctcccgggaagccccgctcgtgggaccgcgccacctgcgccgcctctgcggcccgcagcccgacgggcgccgccatgttggggtcctagcgagggacgcgtaggtgtcttcataagatgccggggcagcggcgcgcgctttcccccaagatggcgtccatgcgggagagcgacacgggcctgtggctgcacaacaagctgggggccacggacgagctgtgggcgccgcccagcatcgcgtccctgctcacggccgcggtcatcgacaacatccgtctctgcttccatggcctctcgtcggcagtgaagctcaagttgctactcgggacgctgcacctcccgcgccgcacggtggacgagatgaagggcgccctaatggagatcatccagctcgccagcctcgactcggacccctgggtgctcatggtcgccgacatcttgaagtcctttccggacacaggctcgcttaacctggagctggaggagcagaatcccaacgttcaggatattttgggagaacttagagaaaaggtgggtgagtgtgaagcgtctgccatgctgccactggagtgccagtacttgaacaaaaacgccctgacgaccctcgcgggacccctcactcccccggtgaagcattttcagttaaagcggaaacccaagagcgccacgctgcgggcggagctgctgcagaagtccacggagaccgcccagcagttgaagcggagcgccggggtgcccttccacgccaagggccgggggctgctgcggaagatggacaccaccaccccactcaaaggcatcccgaagcaggcgcccttcagaagccccacggcgcccagcgtcttcagccccacagggaaccggacccccatcccgccttccaggacgctgctgcggaaggaacgaggtgtgaagctgctggacatctctgagctggatatggttggcgctggccgagaggcgaagcggagaaggaagactctcgatgcggaggtggtggagaagccggccaaggaggaaacggtggtggagaacgccaccccggactacgcagccggcctggtgtccacgcagaaacttgggtccctgaacaatgagcctgcgctgccctccacgagctaccttccctccacgcccagcgtggttcccgcctcctcctacatccccagctccgagacgcccccagccccatcttcccgggaagccagccgcccaccagaggagcccagcgccccgagccccacgttgccagcgcagttcaagcagcgggcgcccatgtacaacagcggcctgagccctgccacacccacgcctgcggcgcccacctcgcctctgacacccaccacacctccggctgtcgcccctaccactcagacacccccggttgccatggtggccccgcagacccaggcccctgctcagcagcagcctaagaagaacctgtccctcacgagagagcagatgttcgctgcccaggagatgttcaagacggccaacaaagtcacgcggcccgagaaggccctcatcctgggcttcatggccggctcccgagagaacccgtgccaggagcagggggacgtgatccagatcaagctgagcgagcacacggaggacctgcccaaggcggacggccagggtagcacaaccatgctggtggacacagtgtttgagatgaactatgccacgggccagtggacgcgcttcaagaagtacaagcccatgaccaatgtgtcctagaaccacctgcctcacagctggccgtcacttgtgggggtccacgggacgatggctttgccagcttaaagtaaccggatggcggacacctggcccccgaggtcccccggccgccgccctgctgctgacccagcctgttttaagttctggatgcatttctctggggtatttggggcttatttttaaaattttaatatgggttcttttttgtgtgatttaagacactttttggactcaacgttacatttttgaatgtagtaagtaaattaaccaaaaaagttacaacttcctaattttagtgacagctctgcctgttagactcttactttttaaaatcttttctattttccctcgctggggcagtgccctcctacccccagggttgaggggaccaaggtggcacggtggtactgggggtgcggcagggacacccgaccacaccagagcgtgggagacggtgggccttgtcccctgcctgtgcctgcctgggagttttgtattcatcttttgtatagttgtggacatttaagacagtctttgggtacctattttcattgtaaaactatctgaaccattaaagtcgagcttttctaaagaaagccaccaaaa

SEQ ID NO: 324 - protein, 539 aa, Homo sapiens
MPGQRRALSPKMASMRESDTGLWLHNKLGATDELWAPPSIASLLTAAVIDNIRLCFHGLSSAVKLKLLLGTLHLPRRTVDEMKGALMEIIQLASLDSDPWVLMVADILKSFPDTGSLNLELEEQNPNVQDILGELREKVGECEASAMLPLECQYLNKNALTTLAGPLTPPVKHFQLKRKPKSATLRAELLQKSTETAQQLKRSAGVPFHAKGRGLLRKMDTTTPLKGIPKQAPFRSPTAPSVFSPTGNRTPIPPSRTLLRKERGVKLLDISELDMVGAGREAKRRRKTLDAEVVEKPAKEETVVENATPDYAAGLVSTQKLGSLNNEPALPSTSYLPSTPSVVPASSYIPSSETPPAPSSREASRPPEEPSAPSPTLPAQFKQRAPMYNSGLSPATPTPAAPTSPLTPTTPPAVAPTTQTPPVAMVAPQTQAPAQQQPKKNLSLTREQMFAAQEMFKTANKVTRPEKALILGFMAGSRENPCQEQGDVIQIKLSEHTEDLPKADGQGSTTMLVDTVFEMNYATGQWTRFKKYKPMTNVS

SEQ ID NO: 325 - DNA, 3861 bp, Homo sapiens
  CDS (44)..(2260)
cgcctggccggcgggctgaggcgtacgggtcgcacgcagcgccatgcgaggcccccctgcctggccgctgcggctgctcgagccaccgagccctgccgagccaggtcggctcctgccggtagcctgcgtgtgggccgcggccagccgcgttcccgggtccctatcgccgttcactggcctgaggccggcgcggctatggggcgcggggcccgcgctgctctggggcgttggagccgcgcgccgctggaggagcggctgccggggcgggggtccgggcgcctcgcggggcgtcctgggcctcgcgcggctcctggggctgtgggctcgcggccccggcagctgcaggtgcggggcttttgccgggccaggcgctcctcggctcccgcgcgcccggttcccgggcggtcccgcagccgctgcctgggcaggggacgaggcctggcggcgcgggccggcggcgcctcccggggacaaggggcggctgcgccccgcagcggccggactcccggaggcccggaagctcctggggctggcgtaccctgagcgccggaggctggcagctgcggttggatttctcacgatgtccagtgttatctccatgtctgcccctttcttcctggggaagatcattgatgtcatctataccaaccccactgtggactacagcgacaacctgacccgcctctgcctagggctcagtgccgtgtttctgtgtggtgctgccgccaatgccattcgtgtctacctcatgcaaacttcaggtcagcgcattgtgaataggctgagaacttcattattctcctccattctgaggcaggaggttgctttctttgacaagactcgcacaggagaattgattaaccgcctctcatcagacactgcactcctggggcgctcagtgactgaaaacctctcagatgggctcagggccggggcccaggcttccgtaggcatcagtatgatgttttttgtctcacctaatctggccacctttgttttgagcgtggtgcctccagtgtcaatcattgctgtaatttatgggcgatatctacggaaactgaccaaagtcactcaggattccctggcacaagccactcagctagctgaggaacgtattggaaatgtaagaactgttcgagcttttgggaaagaaatgactgaaatcgagaaatatgccagcaaagtggaccatgtaatgcagttagcaaggaaagaggcattcgcccgggctggtttctttggagcaactgggctctccggaaacctgatcgtgctttctgtcctgtacaaaggagggctgctgatgggcagtgcccacatgaccgtgggtgaactctcttccttcctaatgtatgctttctgggttggaataagcattggaggtctgagctctttctactcggagctgatgaaaggactgggtgcaggggggcgcctctgggagctcctggagagagagcccaagctgccttttaacgagggggtcatcttaaatgagaaaagcttccagggtgctttggagtttaagaacgtgcattttgcctatccagctcgcccagaggtgcccatatttcaggatttcagcctttccattccgtcaggatctgtcacggcactggttggcccaagtggttctggcaaatcaacagtgctttcactcctgctgaggttgtacgaccctgcttctggaactattagtcttgatggccatgacatccgtcagctaaacccagtgtggctgagatccaaaattgggacagtgagtcaggaacccattttgttttcttgctctattgctgagaacattgcttatggtgctgatgacccttcctctgtgaccgctgaggaaatccagagagtggctgaagtggccaatgcagtggccttcatccggaatttcccccaagggttcaacactgtggttggagaaaagggtgttctcctctcaggtgggcagaaacagcggattgcgattgcccgtgctctgctaaagaatcccaaaattcttctcctagatgaagcaaccagtgcgctggatgccgaaaatgagtaccttgttcaagaagctctagatcgactgatggatggaagaacggtgttagttattgcccatcgtctgtccaccattaagaatgctaatatggttgctgttcttgaccaaggaaaaattactgaatatggaaaacatgaagagctgctttcaaaaccaaatgggatatacagaaaactaatgaacaaacaaagttttatttcagcataaggaagcaattactggtaaacaatatgagactttaatgcaaaacagtgttgcagaaaaaaaactcagagactatgaaatacataaaccatatatcaagttatttgaaaaatacctatttttttccaaagtgtgtaaaagattgttttgaaacgtacctgttctcaagatctttttattcagagttttaataattgtaactttttaaatgtctatagcactgaagttattttcaggttttgtattttcttttcttgtggaatattttaattaatatagcatggcacctcattttcttttgcctgctgttaaagattgaagctattgtcaaatgacaactttaaaaaggcaattataaataaaaagcctgattattttaggccagtttaccaatcactgtgtaattcttctggtagtattctacctacttttaagtctaattttacagatagaataatggaaattgaaaatttaaccctttattccgataatctcatgaagcaaacctaactatttaacatcagctggaaagaagggaacatttatattgcccatctcctgtgtcttcaaaggtgtgagagctgaggaatatgtgttcctatgggaactatgtttgaatatgtgcagttttcaacattttggcacatgaaagcctgacaagtttttaaaagggcagaagctttattttttgaacaggaaaacatgttttttaaattcacatgtttgtatgagtacttttgcgaagcaaggcatgaactgctaggtattattaagaatgaatgatttttgcatttaagttgtttgaaggcatgtattttgaaaaatatctgttacaaatttataatttcaagacaaattgaatcttattttataatacttttggaatttcattaataaggctaaaatttgaggaatataactaattttcagccttaagacatttaagtttggaagtccttgctattcaacagaataacaagaaaacttcagaatgtatcactctcctgaaaagaagatattaataagcccttttatttatggttatagttttatttatagtctcaaaattcctaaagcaatgctacaaccattgaatttgccatattttgtatcagtgctgttaatttgctgttgcctcaagaaaaagtgctttttctccatggatgaggctagaccctaagaagtaattaagtcaatgtaaatcaaatggaagttttcccatgaactaagcatttattagttccctgattagactggaagaagaaaccactatttcatgaaaagcatggaatattatattttattgttcataattaatgaataaaattgatatgaatgaatatagtgttctttgaattagtaaacagtacatctgtgacaatcatttttaacaagctctacttgtgttctttataaagtgtgattttcagaaagcaaacaacacaattacaaggttgaatctgaggaaaataatccttgtgccatagaagtatttacgaaattgcatttcattgttatgttttattttctgatacatgatgttcaattttatctttaggtaatattttatatcatagattaaaatttatagtgaactttaaaaa

SEQ ID NO: 326 - protein, 738 aa, Homo sapiens
MRGPPAWPLRLLEPPSPAEPGRLLPVACVWAAASRVPGSLSPFTGLRPARLWGAGPALLWGVGAARRWRSGCRGGGPGASRGVLGLARLLGLWARGPGSCRCGAFAGPGAPRLPRARFPGGPAAAAWAGDEAWRRGPAAPPGDKGRLRPAAAGLPEARKLLGLAYPERRRLAAAVGFLTMSSVISMSAPFFLGKIIDVIYTNPTVDYSDNLTRLCLGLSAVFLCGAAANAIRVYLMQTSGQRIVNRLRTSLFSSILRQEVAFFDKTRTGELINRLSSDTALLGRSVTENLSDGLRAGAQASVGISMMFFVSPNLATFVLSVVPPVSIIAVIYGRYLRKLTKVTQDSLAQATQLAEERIGNVRTVRAFGKEMTEIEKYASKVDHVMQLARKEAFARAGFFGATGLSGNLIVLSVLYKGGLLMGSAHMTVGELSSFLMYAFWVGISIGGLSSFYSELMKGLGAGGRLWELLEREPKLPFNEGVILNEKSFQGALEFKNVHFAYPARPEVPIFQDFSLSIPSGSVTALVGPSGSGKSTVLSLLLRLYDPASGTISLDGHDIRQLNPVWLRSKIGTVSQEPILFSCSIAENIAYGADDPSSVTAEEIQRVAEVANAVAFIRNFPQGFNTVVGEKGVLLSGGQKQRIAIARALLKNPKILLLDEATSALDAENEYLVQEALDRLMDGRTVLVIAHRLSTIKNANMVAVLDQGKITEYGKHEELLSKPNGIYRKLMNKQSFISA

SEQ ID NO: 327 - DNA, 2961 bp, Homo sapiens
  CDS (134)..(499)
agtgcgcaggcagtgctcgcggcggcggcgacggcggcgggaggttcggttgtcgcccgttggccgcgcggcgccgcgctcggcggccgccattgcagcttgttttcacttgctttttaaagacagaaagctcatggtgcaaattgttatttccagtgcgagggctggaggcctggcagaatgggtgctgatggagctacagggggagatcgaggctcgctacagcactggattagctggaaacctcctgggagacctacattacaccactgagggaatccctgtgctgatcgtggggcatcatatcctgtatgggaaaatcatccacctggagaaaccttttgcagtccttgtcaaacacactcctggggatcaggactgtgatgagcttggccgcgagactggcacccggtacctggtgacagcactcatcaaagacaagatccttttcaaaacccgccccaagcccattatcaccagcgtccccaagaaagtatgaaagaacctcggattttccctagagagcggccaactccttggactcgtgctccgctgccacctcgaggacggctcgacggttccctgggaccacaggggggtcctgttctgaacacaggccacccactgggtgtgaactcggatcccttccttatggcggccggttctcttggtggaaatctgaccccatttccaaggaacccatctccttttccagcttcatcaggctcattggcttcaaatccagcacctttcccggctggtgctcgtgacccaagtatggcttcttttccaagagggatgaatcccactggcacaggtgcagtttctttcccaaggcctggtggcctcttggggccaggcccaggcccaggccccaccctaaaccctaggacaggggctctgccaggcccagggcctctgtctaaccccaggttagggggtctcccaggaccaggtcctatgtccaacccaagggcaggtggtctcctgggagcaggtcctgaccccagaggtggtggtcccatgggccctggatctggacctaacctgagagccggtgttctgttaacctctgggaatggtcctcccaatcctaggccagttggcctgggcccaggaccaaaccccaatctgagatcaggctttttagggacaaaccctgcccccaggtcaggtgtgtttccaggcccaggccttgggcccaacccaagaccaagtggcctgggcccaggccctaatctagatgccagagcaggtggcctcttgggcacaggatctggtcttaacttaagaatggctggacctcaaggcctcgatcttgcccccattctaagagcagcaggtcttttaggagcaaattcagcttctttctcacaggcttctggaaacatgggcacaagcccatcctccatggcaagagtacctggccccatgggcccaaactcgggtcctagctctcggggaattggccttccagggccaaatccatctcccatgtcaagggctcctggccccataggccctaattcagctcatttctcaaggccagttggccccatgggggtaaatgccaatccctttcccaggggagcaggttcatctgccttttctcagtcttctggcacattggcatcaaacccagctaccttccaaaggtccgctggcctccagggctcaaatccaaccattttcccaagagcctctgggccacttggccccaacccagctaacttcccaagggccactggcctgcagggtccaagtccaactaccttcccaaggtctactggcccattaggccctggtcaagttactttccccaggccagctgccgggcatctgggcccttctccagctggccctgtgggtatcaacccagctcctttcacaaggccaactgggaccctgggtctcaacccagcttcctttccaaggatgaatggccctgcaggcaagagtttcgtcccatttcctagagtggggagcctccctggcacaaacccagctgctttccccagaccagggggtccaatggctgcaatgtacccaaatggaatgttgcccccttaaacaccattttccctccaggaccaccttggtttctaggcactgtggttcttggcaggggctgtcttaggtaaaagggtagttgtggagctacagtctgaagaacatagcttgggctcaagttcaaatgagccatctttttcctttgcgtttttcttgactgaaggtgagatgttatttgtggcatgtgaactgtggcaggtgggaataatcctgcccttgagagaaaggatctccagcctcccagaagcctgctgtgctttcgtcccacagctttctgcccattgtttcttactagtttcttgaattgttcttgtggacttttcctcagggatacattggcctgcaggtcccagttcacatgtagtcccctgctcaccattggagaatcagctcactgctctctagaaacgtggcgttggtgaacggaccatgcttccgtagctctgacctgggcagcttggacctggtcatcctctactgccatacctttccctgggggcttgaacacagaacagggagatggacaaccacttcaaagaaagacccaccgaatgcagtttctgcttgactgactgggcctgcagctcccttctcctgggacttagaggtggccagatttaaggcccctctactcatccaactccctcttcactggtactcccaatcaatcaaagaacctcaaaatttaaactgatgtggatgggaatatgggaattagggtgggggtgggggatgaagggaagaaatcactgtgctttgttcggcctggtgtgcaaggatggttggtggttttcctgcattgtatcttttcttactgtttctttaataaatgggatgagagggcaaaaaaaaaaaaaaaaaaaaaaaaaaaaaaaaaaaaaaaaaaaaaaa

SEQ ID NO: 328 - protein, 121 aa, Homo sapiens
MVQIVISSARAGGLAEWVLMELQGEIEARYSTGLAGNLLGDLHYTTEGIPVLIVGHHILYGKIIHLEKPFAVLVKHTPGDQDCDELGRETGTRYLVTALIKDKILFKTRPKPIITSVPKKV

SEQ ID NO: 329 - DNA, 4018 bp, Homo sapiens
  CDS (247)..(2496)
gttccgcccgccgctcttccagctgagactcggcagcggcggtcggagcggctgccacgccgcacctgcccgcgagggggcgcgccaggcccaggccgcagccgactgccgcgctctctgtccccgccctccgccatccccggactgcgctcacctgtctgggccgctggcctgggaggcgggggccggcgggagccaagccgaggaaagggcggagcggctctccgggcgcgtcatcggagcaccatggcggagctaggagctggcggcgacggccacaggggcggcgacggcgcagtgcgaagcgaaacagcacccgacagctacaaagtgcaagataagaaaaatgcctccagccgccctgcctctgcaatttcaggacaaaataacaaccactcaggaaataaaccagaccctccgcctgtgttacgtgttgatgaccggcagcggctggcccgggagcgacgtgaggaacgggagaaacagctagctgcaagagaaatagtgtggttagaaagagaagagcgagccaggcagcactacgagaagcacctggaagagcggaagaagaggttggaggagcagaggcagaaggaggagcggaggagggctgctgtggaggagaagcggaggcagagacttgaggaggacaaagaacgccacgaagctgttgtacggcgcacaatggaaaggagccagaagccaaaacagaagcataaccgttggtcgtggggaggctctctccatgggagccctagcatccacagtgcagatccagacaggcggtcagtttccaccatgaatctttcgaaatatgttgatcccgtcattagcaagcggctctcctcttcatctgcaactttactaaattctccagatagagctcgccgcctgcagctcagcccatgggagagcagcgttgttaacagactcctgacgcccacacattcgttcctggccagaagtaaaagcacagctgccttgtctggagaagcagcatcttgcagccccatcatcatgccctacaaagctgcacactctagaaattcgatggatcgaccaaaactctttgtaacaccacctgagggctcttctcgcaggaggatcattcatggcacagcgagctataaaaaagaaagagagagagaaaatgtactcttcctcacatctggcacccgaagggctgtatctccatctaatcccaaagcaagacaaccagctcgctcccgactttggcttccgtccaagtctcttcctcatttgcctggcacacccagaccgacatcctccttgccacccggctcagtcaaagctgctcctgctcaggtccggcccccatcccccggcaacatccgccctgtcaagagggaagtcaaagtggagcctgagaagaaagatcctgagaaggaacctcagaaagttgccaatgagccctcactaaagggcagagcacctttagtgaaggtagaagaagccacagttgaagagcggacacctgctgaaccagaagttggccctgctgctccagccatggccccagctccagcctcggccccagctccagcctcggccccagctccagccccggtccccaccccagccatggtctcagccccgtcatccactgtgaatgccagtgcttctgttaagacttctgcaggcaccaccgacccagaggaggccacaaggcttctagctgagaagaggcggctggcccgagagcagagagaaaaggaagaaagggagaggagggagcaggaagagcttgaaagacaaaagagagaggaattggctcaacgtgtggctgaagagaggacgactcgccgtgaggaggagtcgcgcaggctggaagccgagcaggcccgggagaaggaggagcagctgcagcggcaggcggaggagcgggcgctgcgcgagcgggaggaggcagagcgcgcccagaggcagaaagaagaagaagctcgcgttcgtgaagaagcagagagggtccggcaggaacgagagaagcatttccagagagaagagcaagagcgcctggagagaaagaagcgacttgaggagattatgaaaagaaccaggagaacagaagctacagataagaaaaccagtgatcagagaaacggtgatatagccaagggagctctcactggaggaacagaggtgtctgcacttccatgtacaacaaacgctccgggaaatggaaagccagttggcagcccacatgtggttacctcacaccagtcaaaagtgacagtggagagcactcccgatttggaaaaacaaccaaatgaaaatggtgtatctgttcagaatgaaaattttgaagaaattataaacttacccattggatctaaaccatccagattagatgtcaccaacagtgagagcccagaaattcctttgaatccaattttggcctttgatgatgaagggacacttgggcccctgcctcaggtagatggtgttcagacacagcagactgcagaagttatatgagtgtttcttctgaagaaccaaagctgaaatttaatgagaatttctacaattaatggaattcctttcctgctataaaggagcatcccctccacccgttttctagagttcttgaccatcattttgaaaagatttattaaaactagctaaagacaacagactggatagcttttctaataattttcatcaataggaaaaaagaaatacgtctcattcttcaatactttaaaatggctttttccagtgtgctccttcttagcaatcaatatttttctgcattctttaaaagacaagagaatttggttataaaagaaatgggctgactaggcatgatttttttggtcttaaaagcttaacatgtaaaattggcaaaaaaaattttttaccttttataatacttgaaaaataagtacctctttgttctacaagtagaatgaataggagaagagtttaagcctgtttttttaaaatattattgcaaagagctctatttgtagaagcaaattataggcagattaccaggttcttataaatacagcttgtacatggacattctgcaaacccagctgtcacatttttcttgcaactccttttgcaaaagcagactaaaatgttttaaaatgtgaaaaaacattattttttcaaagcaagaaaataatttactgccctcttacataatgtatttataaagtttttccagataaactaatcaaataaattagaataatgtgacaacattacaaatttaatttgttagctgcattccttctgatgttaccacgatagaatgttactgatgattcagggctatttctgaagtctgtatgttgctgctgtccccagtgatggtggacttatctttgccttacctgatcacaaattatgttggggaaaataaagatttaatatttctttaaatagaaaaagaatttggttttgctcgtttaagagcaatgagaaaatgatggaatgttgactgtgtttggcacacaggacacggaccttcatggaagtccttgctctgcgtggcatctgtcagcttttcacctttcattcttattcttcacttttgctgctgagcctagctgtacaaacttgcactttcatttgctaatataaattcagttttattttaccattttagagactactaatgattaaatgtagaaggagagggtgcacatgtttttatgtggagtgtttaaaagataaatttataccactgtaatgtgcagcttttattaaaagagaaattggttgaactgctaggttgaatgagagacttcatctattggactattttttttaatccaggcatatggtctttagtaatggcttgtaatttgtgaaaacattaatttgggggttttccctgttttcagttgtccatgtacacatagtcattatattagaaaagaaagctgttcaacaaacttgtttaatttgtttaaatcaacatagcatgaaacaccaaataaaatgtttgacatagttttaaaaaaaaaaaaaaaaaaaaaaaaaaaaa

SEQ ID NO: 330 - protein, 749 aa, Homo sapiens
MAELGAGGDGHRGGDGAVRSETAPDSYKVQDKKNASSRPASAISGQNNNHSGNKPDPPPVLRVDDRQRLARERREEREKQLAAREIVWLEREERARQHYEKHLEERKKRLEEQRQKEERRRAAVEEKRRQRLEEDKERHEAVVRRTMERSQKPKQKHNRWSWGGSLHGSPSIHSADPDRRSVSTMNLSKYVDPVISKRLSSSSATLLNSPDRARRLQLSPWESSVVNRLLTPTHSFLARSKSTAALSGEAASCSPIIMPYKAAHSRNSMDRPKLFVTPPEGSSRRRIIHGTASYKKERERENVLFLTSGTRRAVSPSNPKARQPARSRLWLPSKSLPHLPGTPRPTSSLPPGSVKAAPAQVRPPSPGNIRPVKREVKVEPEKKDPEKEPQKVANEPSLKGRAPLVKVEEATVEERTPAEPEVGPAAPAMAPAPASAPAPASAPAPAPVPTPAMVSAPSSTVNASASVKTSAGTTDPEEATRLLAEKRRLAREQREKEERERREQEELERQKREELAQRVAEERTTRREEESRRLEAEQAREKEEQLQRQAEERALREREEAERAQRQKEEEARVREEAERVRQEREKHFQREEQERLERKKRLEEIMKRTRRTEATDKKTSDQRNGDIAKGALTGGTEVSALPCTTNAPGNGKPVGSPHVVTSHQSKVTVESTPDLEKQPNENGVSVQNENFEEIINLPIGSKPSRLDVTNSESPEIPLNPILAFDDEGTLGPLPQVDGVQTQQTAEVI

SEQ ID NO: 331 - DNA, 1262 bp, Homo sapiens
  CDS (244)..(864)
tgtgtcacttccggcctccctttagctgccatcttgcgtccccgcgtgtgtgcgcctaatctcaggtggtccacccgagaccccttgagcaccaaccctagtcccccgcgcggccccttattcgctccgacaaggtacaaaaaggctctggacggcggcgtggtaggaggacgggagcgggggcgggaagttccctgaaggagcgagacagggagggacagggcagaggaggagaggaaggcgatgcgacggacaggcgcacccgctcaggctgactctcgggggcgaggtcgagccaggggcggctgccctgggggcgaggcgacgctgtctcaacctccacctcgcggcggaacccgaggacaggagcctcagatgaaagaaacaatcatgaaccaggaaaaactcgccaaactgcaggcacaagtgcgcattggtgggaaaggaactgctcgcagaaagaagaaggtggttcatagaacagccacagcagatgacaaaaaacttcagttctccttaaagaagttaggggtaaacaatatctctggtattgaagaggtgaatatgtttacaaaccaaggaacagtgatccactttaacaaccctaaagttcaggcatctctggcagcgaacactttcaccattacaggccatgctgagacaaagcagctgacagaaatgctacccagcatcttaaaccagcttggtgcggatagtctgactagtttaaggagactggccgaagctctgcccaaacaatctgtggatggaaaagcaccacttgctactggagaggatgatgatgatgaagttccagatcttgtggagaattttgatgaggcttccaagaatgaggcaaactgaattgagtcaacttctgaagataaaacctgaagaagttactgggagctgctattttatattatgactgctttttaagaaatttttgtttatggatctgataaaatctagatctctaatatttttaagcccaagccccttggacactgcagctcttttcagtttttgcttatacacaattcattctttgcagctaattaagccgaagaagcctgggaatcaagtttgaaacaaagattaataaagttctttgcctagtatacagttttatttttttatttcattgacaccgatctgtacacagtaaaaaaaattgcttatagaaagctaatcatggcatgtaatatggctgataacctttggaatttgattaaagatttaaaatcacaaaaaaaaaaaaa

SEQ ID NO: 332 - protein, 206 aa, Homo sapiens
MRRTGAPAQADSRGRGRARGGCPGGEATLSQPPPRGGTRGQEPQMKETIMNQEKLAKLQAQVRIGGKGTARRKKKVVHRTATADDKKLQFSLKKLGVNNISGIEEVNMFTNQGTVIHFNNPKVQASLAANTFTITGHAETKQLTEMLPSILNQLGADSLTSLRRLAEALPKQSVDGKAPLATGEDDDDEVPDLVENFDEASKNEAN

SEQ ID NO: 333 - DNA, 3172 bp, Homo sapiens
  CDS (65)..(2680)
gtcggttcccgattctggtccccggcccccagcagcgcctgcccccttcccaccggggccccccatgatgccaccacccttcatgccccctccagggatccccccaccctttcctccgatggggctaccccccatgagtcagagaccaccagctatcccccccatgccacctggcatcctgcccccaatgcttccaccaatgggggcgccaccaccactcacacagataccaggaatggtacctccgatgatgccaggaatgctgatgccagcggtgcctgtcaccgcagcgacggctccgggtgcggacaccgccagctctgctgtggctgggacaggccctccgagggccctatggagtgagcatgtggccccagatgggcgcatctactactacaatgctgacgacaagcagtccgtgtgggagaagcccagcgtgctcaagtccaaggcagagctgctcctgtcccaatgtccctggaaagagtacaagtcggacacaggcaaaccttattactataacaaccagagtaaagagtcccgctggacccggcccaaggatctggatgacctagaggttctagtcaaacaagaggctgcagggaaacagcagcagcagctgccacagacacttcagccacagccacctcagccacagcctgaccccccacctgtgcctcctggccccaccccagtgcccacaggcctcctggaacctgagccaggtgggagtgaagattgtgatgtgttggaggccacccagcccctggaacaggggttcctgcagcagctggaggagggccccagcagttctggacagcatcagccacagcaggaggaggaggaatcaaagccagaaccagagaggtctggcctcagttggagcaaccgggagaaggcaaagcaggcattcaaggaactgctgagggacaaggctgtcccctccaatgcctcatgggaacaggccatgaagatggtggtcaccgacccccgttacagtgccttgcctaaactgagtgagaaaaagcaggcattcaatgcctacaaggcgcagcgggagaaggaggagaaggaggaggcccggctaagggccaaagaggccaagcagaccctgcagcatttcctggagcagcatgaacgcatgacctccaccacccgctaccggcgggcagaacagacctttggggagctggaggtctgggctgtggtccctgagagggatcgaaaagaggtttatgatgatgtcctcttcttcctggccaagaaggagaaggaacaggccaagcagctccggcgccgcaatatccaggccctaaagagcatcctggatgggatgagtagtgtcaacttccaaaccacgtggtcccaggcccagcagtacctcatggataaccccagctttgctcaggaccatcagctgcagaacatggacaaggaagatgcactgatctgttttgaggagcacatccgagctttggagagggaagaggaggaggaacgggagcgggcccggcttcgggagcgacgccaacaacgcaagaatcgggaggccttccagaccttcctggacgagctgcatgagacagggcagctgcactctatgtccacctggatggagctatatccagcagtcagcactgatgtccgctttgccaacatgctgggccagccgggctccacccctctggacttattcaagttctatgtggaggagttgaaggcacgattccatgatgaaaagaagatcattaaggacatccttaaggaccggggcttctgcgtggaggtgaacacggcctttgaggacttcgcccacgtcataagctttgacaagagggctgccgcactggacgcaggcaacatcaagctgaccttcaatagtctgctggagaaagcagaggcacgggagagggagcgggagaaggaggaggcacgcaggatgcggcgcagggaagctgcctttcgaagcatgctgaggcaggctgtgcctgctctggagctaggcactgcctgggaagaggtccgtgagcgttttgtgtgtgactcagcctttgagcagatcaccctggagtcggagcggatccggctcttccgggagttcctacaggtgctggagcagactgaatgccagcacctccacaccaaaggccgaaagcatggcaggaaaggcaagaagcaccatcacaagcgttcccactcaccctcaggctctgagtcagaagaagaggagctgcccccaccatctctccggccccccaagcggaggaggcggaacccctcagagtcaggctctgagccctcttcctcacttgattcagttgaaagtgggggtgctgcccttggaggacggggctccccttcctcccatcttcttggagcagatcatggccttcggaaagccaagaaaccaaaaaagaaaactaagaagagaagacacaagtcgaatagtcctgagagtgagacagaccctgaggagaaagctggcaaggagagcgatgagaaagaacaagaacaggacaaggacagggagctccaacaggcagagctccctaaccgttccccaggctttggaatcaagaaggagaagacaggctgggacacgtcagaaagtgagctgagtgagggtgagctggagaggcggcggcggacactcctacagcagctggatgatcaccagtgacccaatgagctgttctctgcctcgggtctgtgtgaggccatggctcctgggccaccctcaccgtctgcctcagacttcttccttagtctggtctgtgtccactttttctaaagtaaccccacccccagcacaccattgttggcacctctcaaggttgctcttggtgttcaagggtcccctactccctggactagtgcagtccttgccctcagccccagaccagagatgggtggtatatgccatgtggggtgggtgatgccagtagataaaagtgtgagagaaggggtctccagggaagagtcacaggctgttggacacagcctgggtggcagagggcagggtcatcaccctctagcatcagtgcctgctcctgcctgccctggccctgaggctccaccacttcttcctccacccaggacctaatgtacgtgtgttttgttttttgttttttaaataacaatatttataacatggaaaaaaaaaaaaaaaaaa

SEQ ID NO: 334 - protein, 871 aa, Homo sapiens
MMPPPFMPPPGIPPPFPPMGLPPMSQRPPAIPPMPPGILPPMLPPMGAPPPLTQIPGMVPPMMPGMLMPAVPVTAATAPGADTASSAVAGTGPPRALWSEHVAPDGRIYYYNADDKQSVWEKPSVLKSKAELLLSQCPWKEYKSDTGKPYYYNNQSKESRWTRPKDLDDLEVLVKQEAAGKQQQQLPQTLQPQPPQPQPDPPPVPPGPTPVPTGLLEPEPGGSEDCDVLEATQPLEQGFLQQLEEGPSSSGQHQPQQEEEESKPEPERSGLSWSNREKAKQAFKELLRDKAVPSNASWEQAMKMVVTDPRYSALPKLSEKKQAFNAYKAQREKEEKEEARLRAKEAKQTLQHFLEQHERMTSTTRYRRAEQTFGELEVWAVVPERDRKEVYDDVLFFLAKKEKEQAKQLRRRNIQALKSILDGMSSVNFQTTWSQAQQYLMDNPSFAQDHQLQNMDKEDALICFEEHIRALEREEEEERERARLRERRQQRKNREAFQTFLDELHETGQLHSMSTWMELYPAVSTDVRFANMLGQPGSTPLDLFKFYVEELKARFHDEKKIIKDILKDRGFCVEVNTAFEDFAHVISFDKRAAALDAGNIKLTFNSLLEKAEAREREREKEEARRMRRREAAFRSMLRQAVPALELGTAWEEVRERFVCDSAFEQITLESERIRLFREFLQVLEQTECQHLHTKGRKHGRKGKKHHHKRSHSPSGSESEEEELPPPSLRPPKRRRRNPSESGSEPSSSLDSVESGGAALGGRGSPSSHLLGADHGLRKAKKPKKKTKKRRHKSNSPESETDPEEKAGKESDEKEQEQDKDRELQQAELPNRSPGFGIKKEKTGWDTSESELSEGELERRRRTLLQQLDDHQ

SEQ ID NO: 335 - DNA, 4217 bp, Homo sapiens
  CDS (56)..(3880)
agtccctctttgggtgacctgtgcctgcttcgtgcctggtgtgacgtctctcaggatgcctgagccggggaagaagccagtctcagcttttagcaagaagccacggtcagtggaagtggccgcaggcagccctgccgtgttcgaggccgagacagagcgggcaggagtgaaggtgcgctggcagcgcggaggcagtgacatcagcgccagcaacaagtacggcctggccacagagggcacacggcatacgctgacagtgcgggaagtgggccctgccgaccagggatcttacgcagtcattgctggctcctccaaggtcaagttcgacctcaaggtcatagaggcagagaaggcagagcccatgctggcccctgcccctgcccctgctgaggccactggagcccctggagaagccccggccccagccgctgagctgggagaaagtgccccaagtcccaaagggtcaagctcagcagctctcaatggtcctacccctggagcccccgatgaccccattggcctcttcgtgatgcggccacaggatggcgaggtgaccgtgggtggcagcatcaccttctcagcccgcgtggccggcgccagcctcctgaagccgcctgtggtcaagtggttcaagggcaaatgggtggacctgagcagcaaggtgggccagcacctgcagctgcacgacagctacgaccgcgccagcaaggtctatctgttcgagctgcacatcaccgatgcccagcctgccttcactggcagctaccgctgtgaggtgtccaccaaggacaaatttgactgctccaacttcaatctcactgtccacgaggccatgggcaccggagacctggacctcctatcagccttccgccgcacgagcctggctggaggtggtcggcggatcagtgatagccatgaggacactgggattctggacttcagctcactgctgaaaaagagagacagtttccggaccccgagggactcgaagctggaggcaccagcagaggaggacgtgtgggagatcctacggcaggcacccccatctgagtacgagcgcatcgccttccagtacggcgtcactgacctgcgcggcatgctaaagaggctcaagggcatgaggcgcgatgagaagaagagcacagcctttcagaagaagctggagccggcctaccaggtgagcaaaggccacaagatccggctgaccgtggaactggctgaccatgacgctgaggtcaaatggctcaagaatggccaggagatccagatgagcggcagcaagtacatctttgagtccatcggtgccaagcgtaccctgaccatcagccagtgctcattggcggacgacgcagcctaccagtgcgtggtgggtggcgagaagtgtagcacggagctctttgtgaaagagccccctgtgctcatcacgcgccccttggaggaccagctggtgatggtggggcagcgggtggagtttgagtgtgaagtatcggaggagggggcgcaagtcaaatggctgaaggacggggtggagctgacccgggaggagaccttcaaataccggttcaagaaggacgggcagagacaccacctgatcatcaacgaggccatgctggaggacgcggggcactatgcactgtgcactagcgggggccaggcgctggctgagctcattgtgcaggaaaagaagctggaggtgtaccagagcatcgcagacctgatggtgggcgcaaaggaccaggcggtgttcaaatgtgaggtctcagatgagaatgttcggggtgtgtggctgaagaatgggaaggagctggtgcccgacagccgcataaaggtgtcccacatcgggcgggtccacaaactgaccattgacgacgtcacacctgccgacgaggctgactacagctttgtgcccgagggcttcgcctgcaacctgtcagccaagctccacttcatggaggtcaagattgacttcgtacccaggcaggaacctcccaagatccacctggactgcccaggccgcataccagacaccattgtggttgtagctggaaataagctacgtctggacgtccctatctctggggaccctgctcccactgtgatctggcagaaggctatcacgcaggggaataaggccccagccaggccagccccagatgccccagaggacacaggtgacagcgatgagtgggtgtttgacaagaagctgctgtgtgagaccgagggccgggtccgcgtggagaccaccaaggaccgcagcatcttcacggtcgagggggcagagaaggaagatgagggcgtctacacggtcacagtgaagaaccctgtgggcgaggaccaggtcaacctcacagtcaaggtcatcgacgtgccagacgcacctgcggcccccaagatcagcaacgtgggagaggactcctgcacagtacagtgggagccgcctgcctacgatggcgggcagcccatcctgggctacatcctggagcgcaagaagaagaagagctaccggtggatgcggctgaacttcgacctgattcaggagctgagtcatgaagcgcggcgcatgatcgagggcgtggtgtacgagatgcgcgtctacgcggtcaacgccatcggcatgtccaggcccagccctgcctcccagcccttcatgcctatcggtccccccagcgaacccacccacctggcagtagaggacgtctctgacaccacggtctccctcaagtggcggcccccagagcgcgtgggagcaggaggcctggatggctacagcgtggagtactgcccagagggctgctcagagtgggtggctgccctgcaggggctgacagagcacacatcgatactggtgaaggacctgcccacgggggcccggctgcttttccgagtgcgggcacacaatatggcagggcctggagcccctgttaccaccacggagccggtgacagtgcaggagatcctgcaacggccacggcttcagctgcccaggcacctgcgccagaccattcagaagaaggtcggggagcctgtgaaccttctcatccctttccagggcaagccccggcctcaggtgacctggaccaaagaggggcagcccctggcaggcgaggaggtgagcatccgcaacagccccacagacaccatcctgttcatccgggccgctcgccgcgtgcattcaggcacttaccaggtgacggtgcgcattgagaacatggaggacaaggccacgctggtgctgcaggttgttgacaagccaagtcctccccaggatctccgggtgactgacgcctggggtcttaatgtggctctggagtggaagccaccccaggatgtcggcaacacggagctctgggggtacacagtgcagaaagccgacaagaagaccatggagtggttcaccgtcttggagcattaccgccgcacccactgcgtggtgccagagctcatcattggcaatggctactacttccgcgtcttcagccagaatatggttggctttagtgacagagcggccaccaccaaggagcccgtctttatccccagaccaggcatcacctatgagccacccaactataaggccctggacttctccgaggccccaagcttcacccagcccctggtgaaccgctcggtcatcgcgggctacactgctatgctctgctgtgctgtccggggtagccccaagcccaagatttcctggttcaagaatggcctggacctgggagaagacgcccgcttccgcatgttcagcaagcagggagtgttgactctggagattagaaagccctgcccctttgacgggggcatctatgtctgcagggccaccaacttacagggcgaggcacggtgtgagtgccgcctggaggtgcgagtgcctcagtgaccaggctggctcctggggatggccaggtacaaccggatgccagccccgtgccaggagcctggagggaagttggggaaacccctccctactgttggatgtatgtgtgacaagtgtgtctcctgtgctgcgatgggggatcagcagggcagttgtcgggcagtcctgagtgggtgttgcacagactggtccacagggctcctgaaggaagcccctggatctttggggtaaaaggagggtggcctcaagaaacaatgtctggggacaggcctttctggcctgctatgtcttcccaatgtttattgggcaataaaagataagtgcagtcacagagaactca

SEQ ID NO: 336 - protein, 1274 aa, Homo sapiens
MPEPGKKPVSAFSKKPRSVEVAAGSPAVFEAETERAGVKVRWQRGGSDISASNKYGLATEGTRHTLTVREVGPADQGSYAVIAGSSKVKFDLKVIEAEKAEPMLAPAPAPAEATGAPGEAPAPAAELGESAPSPKGSSSAALNGPTPGAPDDPIGLFVMRPQDGEVTVGGSITFSARVAGASLLKPPVVKWFKGKWVDLSSKVGQHLQLHDSYDRASKVYLFELHITDAQPAFTGSYRCEVSTKDKFDCSNFNLTVHEAMGTGDLDLLSAFRRTSLAGGGRRISDSHEDTGILDFSSLLKKRDSFRTPRDSKLEAPAEEDVWEILRQAPPSEYERIAFQYGVTDLRGMLKRLKGMRRDEKKSTAFQKKLEPAYQVSKGHKIRLTVELADHDAEVKWLKNGQEIQMSGSKYIFESIGAKRTLTISQCSLADDAAYQCVVGGEKCSTELFVKEPPVLITRPLEDQLVMVGQRVEFECEVSEEGAQVKWLKDGVELTREETFKYRFKKDGQRHHLIINEAMLEDAGHYALCTSGGQALAELIVQEKKLEVYQSIADLMVGAKDQAVFKCEVSDENVRGVWLKNGKELVPDSRIKVSHIGRVHKLTIDDVTPADEADYSFVPEGFACNLSAKLHFMEVKIDFVPRQEPPKIHLDCPGRIPDTIVVVAGNKLRLDVPISGDPAPTVIWQKAITQGNKAPARPAPDAPEDTGDSDEWVFDKKLLCETEGRVRVETTKDRSIFTVEGAEKEDEGVYTVTVKNPVGEDQVNLTVKVIDVPDAPAAPKISNVGEDSCTVQWEPPAYDGGQPILGYILERKKKKSYRWMRLNFDLIQELSHEARRMIEGVVYEMRVYAVNAIGMSRPSPASQPFMPIGPPSEPTHLAVEDVSDTTVSLKWRPPERVGAGGLDGYSVEYCPEGCSEWVAALQGLTEHTSILVKDLPTGARLLFRVRAHNMAGPGAPVTTTEPVTVQEILQRPRLQLPRHLRQTIQKKVGEPVNLLIPFQGKPRPQVTWTKEGQPLAGEEVSIRNSPTDTILFIRAARRVHSGTYQVTVRIENMEDKATLVLQVVDKPSPPQDLRVTDAWGLNVALEWKPPQDVGNTELWGYTVQKADKKTMEWFTVLEHYRRTHCVVPELIIGNGYYFRVFSQNMVGFSDRAATTKEPVFIPRPGITYEPPNYKALDFSEAPSFTQPLVNRSVIAGYTAMLCCAVRGSPKPKISWFKNGLDLGEDARFRMFSKQGVLTLEIRKPCPFDGGIYVCRATNLQGEARCECRLEVRVPQ

SEQ ID NO: 337 - DNA, 5472 bp, Homo sapiens
  CDS (175)..(2841)
tggataggagagctggcgcagctgccctggtggcagtggctgaagtggcggcggcttcggcggctgcggcggctgcaacagcttcgggctcggggttttggcggcggcgccggcgggctaggctgcgcggtgcggaccccggcgcgcggtccgggttgctggggcggcgcgtagatggagtcttgctacattgcccaggctggtcttgaactgctaggctcaagcagttctcccaccttgacctcccaaagcgctgagattacagaagatgcctctaatggaggagtttctgagcagcacccctggcccagtggctttgaaagggagctcaaaccagagactatttcaagccctggatatcatatcctgagggccacaggagaagagaacatggctgtgagtttggatgacgacgtgccgctcatcctgaccttggatgagggtggcagtgccccactggctccctccaacggcctgggccaagaagagctacctagcaaaaatggcggcagctatgccatccacgactcccaggcccccagtctcagctctgggggtgagagttccccctccagccccgcacacaactgggagatgaattaccaagaggcagcaatctacctccaggaaggcgagaacaacgacaagttcttcacccaccccaaggatgccaaggcgctggcggcctacctctttgcacacaatcacctcttctacctgatggagctggccacggccctgctgctgctgctgctctccctgtgcgaggcccccgccgtccccgcactccggcttggcatctatgtccacgccaccctggagctgtttgccctgatggtggtagtgtttgaactctgcatgaagttacgctggctgggcctccacaccttcatccggcacaagcggaccatggtcaagacctcggtgctggtggtgcagtttgtcgaggccatcgtggtgttggtacggcagatgtcccatgtgcgggtgacccgagcactgcgctgcattttcctggtggactgtcggtattgcggtggcgtccggcgcaacctgcggcagatcttccagtccctgccgcccttcatggacatcctcctgctgctgctgttcttcatgatcatctttgccatcctcggtttctacttgttctcccctaacccttcagacccctacttcagcaccctggagaacagcatcgtcagtctgtttgtccttctgaccacagccaatttcccagatgtgatgatgccctcctactcccggaacccctggtcctgcgtcttcttcatcgtgtacctctccatcgagctgtatttcatcatgaacctgcttctggctgtggtgttcgacaccttcaatgacattgagaaacgcaagttcaagtctttgctactgcacaagcgaaccgctatccagcatgcctaccgcctgctcatcagccagaggaggcctgccggcatctcctacaggcagtttgaaggcctcatgcgcttctacaagccccggatgagtgccagggagcgctatcttaccttcaaggccctgaatcagaacaacacacccctgctcagcctaaaggacttttacgatatctacgaagttgctgctttgaagtggaaggccaagaaaaacagagagcactggtttgatgagcttcccaggacggcgctcctcatcttcaaaggtattaatatccttgtgaagtccaaggccttccagtatttcatgtacttggtggtggcagtcaacggggtctggatcctcgtggagacatttatgctgaaaggtgggaacttcttctccaagcacgtgccctggagttacctcgtctttctaactatctatggggtggagctgttcctgaaggttgccggcctgggccctgtggagtacttgtcttccggatggaacttgtttgacttctccgtgacagtgttcgccttcctgggactgctggcgctggccctcaacatggagcccttctatttcatcgtggtcctgcgccccctccagctgctgaggttgtttaagttgaaggagcgctaccgcaacgtgctggacaccatgttcgagctgctgccccggatggccagcctgggcctcaccctgctcatcttttactactccttcgccatcgtgggcatggagttcttctgcgggatcgtcttccccaactgctgcaacacgagtacagtggcagatgcctaccgctggcgcaaccacaccgtgggcaacaggaccgtggtggaggaaggctactattatctcaataattttgacaacatcctcaacagctttgtgaccctgtttgagctcacagttgtcaacaactggtacatcatcatggaaggcgtcacctctcagacctcccactggagccgcctctacttcatgaccttttacattgtgaccatggtggtgatgacgatcattgtcgcctttatcctcgaggccttcgtcttccgaatgaactacagccgcaagaaccaggactcggaagttgatggtggcatcacccttgagaaggaaatctccaaagaagagctggttgccgtcctggagctctaccgggaggcacggggggcctcctcggatgtcaccaggctgctggagaccctctcccagatggagagataccagcaacattccatggtgtttctgggacggcgatcaaggaccaagagcgacctgagcctgaagatgtaccaggaggagatccaggagtggtatgaggagcatgccagggagcaagagcagcagcgacaactcagcagcagtgcagcccccgccgcccagcagcccccaggcagccgccagcgctcccagaccgttacctagcccagcgcccgaaagccgtctcttctatgcaataacacaatagtattactctactgcgatgtacggaactgcggtgtgtgtacacatactcacgtatatgcacatatttatatacaggaagaaaaaagacagacaagatggggcttggtttataaccaccttgccctgtcttccttaactccagaagccagtttggtgaggggtgggggtgcggccaccaggtctgagctcttcctactgtggaaggctccagaaggcccttcacaaggagacccctcacctggatccagtcgactgcggggcttgcccctcatgtgggctggcctccatcggccacgtccaaagctgtcactgctactgcttcaggctcacatccccccgacctgatggcgtgcccgccccctctccctgcggcccatgccacaggtttctgtgttttgctttagggacagaaccacttaggaaggaaagaactcccggtctccagggtggtatttcagtgtctgtgataatgtcacgcaacacctcttcggggaccagtgcccaggatctaatggaagcggaattggggcaactgggcccatgtggccagagctcagttagccagtgccgggcggccacagattacactgaccaatctcctcccttggctctgcaagcctcccacccagccttctctggcttaacccttgttggcgaaaactcttccacagtggcctccttggggacccagaacccggaggaaggggcatgaggcaggaagtggggccgatgtctgcaacccagaccacttcgtggaatgggctcttgaccaaatccctttttttgcgatttacccgttcaagcaaaacaacgttttggttaactaaggattgtgctaaagccgataccaggtccttcacacgtgtgcactaggaacaggagcgaacagcacagagagacgctccctgtgggacgcagcagccccgtggccccggcccagttcccagccaccctccctggctctgctcacaccagagatttccatagcaggagcggttggtgcagaagtaggttcagatgaacctcagttaacgtcgccacccctcctcccaccatggtaccctgtaggagccctgtatgacatctgagcgtggtggaggtaggagggttgccagctgcagtgaccctgccacagaggcagggtcagtgcagaggtcgctttggttccgcttccctgggccacagaacggaacacagcataggttctgcagcaggagccgcagtggcaggatggagggtgcgaagggcaaggagtgcactgctgggcattcctggccagccccggccctctggtgcctgcttcctgtgacttcagaaggcaggtggacagagcctccctctggccttgtcctcttcccagccacagaacgggcagggtggcacccgaccccaggggagcagtacctggtcccccaccccctcctcccaaccacctccaaggccaagctgggtcccatagccagcacggcatggttctccccttccccccttcccaggtcaggggagttggacaagtagcaggtgtttgtttttaaagcacagccctttgggaaagcaacacattattgagactcactgtgattcccccgggagtcagactggctttgtcctcttcctctctggagggccatgggccatcagcaggagctccacatcgagccccaggccagaaccccctccctttcacagagagggaactttattgcacaattgggtgccttttagcttttgtgtgttgaaatgggcgttttggaagcaagggtcaggggacagcttctaaaggtgtgagtctctgacctgagcatctgggcctcgcctgggcccttcttcctccccaggggtggaaacgtggaggggccagcagcaccccggggtctgcccaggggagtcaaggccccgaggtgggggggcctattccaggaggagtgggatctcggccctgtccagagcgagttaatgtgtccatctgcccaaccctgtcctgagaaaggacctggttttggccaggacctgacaaatacccaatggcagcagtgtcaacagacgggagtccagccagggtgggtgcccttgtcattgaggttagggacagctatccccaggttatgcctggccccacccagcagggagttggggtccccccacaggctgtgagctctgtgggccctgggatgtgatctagctcagatgccctctcatccttgatgtcatagttgagtgcacccaagtggcacccactggcggccaggggcacagcctggtggtggtggcaatagaactgtgcccctcctcagctcctcgcttcccctcccacagccccagccttactccaccatgcggacaatcattttgtacggatcacgggagcaatgctgtacggttttgtacactggtggtttgtttcctagaaaacccattgtgtctctggatttctagcacattactaaaagagcctctgctttgtaaaaaaaaaaaaaaaaaaaaaaaaaaaaaaaaaaaaaaaaaaaaaaaaaaaaaaaaaaaaaaaaaaaaaaaaaaaaaaaaaaaaaaaaaaaaaaaaaaaaaaaaaaaaaaaaaaaaaaaaaaaaa

SEQ ID NO: 338 - protein, 888 aa, Homo sapiens
MESCYIAQAGLELLGSSSSPTLTSQSAEITEDASNGGVSEQHPWPSGFERELKPETISSPGYHILRATGEENMAVSLDDDVPLILTLDEGGSAPLAPSNGLGQEELPSKNGGSYAIHDSQAPSLSSGGESSPSSPAHNWEMNYQEAAIYLQEGENNDKFFTHPKDAKALAAYLFAHNHLFYLMELATALLLLLLSLCEAPAVPALRLGIYVHATLELFALMVVVFELCMKLRWLGLHTFIRHKRTMVKTSVLVVQFVEAIVVLVRQMSHVRVTRALRCIFLVDCRYCGGVRRNLRQIFQSLPPFMDILLLLLFFMIIFAILGFYLFSPNPSDPYFSTLENSIVSLFVLLTTANFPDVMMPSYSRNPWSCVFFIVYLSIELYFIMNLLLAVVFDTFNDIEKRKFKSLLLHKRTAIQHAYRLLISQRRPAGISYRQFEGLMRFYKPRMSARERYLTFKALNQNNTPLLSLKDFYDIYEVAALKWKAKKNREHWFDELPRTALLIFKGINILVKSKAFQYFMYLVVAVNGVWILVETFMLKGGNFFSKHVPWSYLVFLTIYGVELFLKVAGLGPVEYLSSGWNLFDFSVTVFAFLGLLALALNMEPFYFIVVLRPLQLLRLFKLKERYRNVLDTMFELLPRMASLGLTLLIFYYSFAIVGMEFFCGIVFPNCCNTSTVADAYRWRNHTVGNRTVVEEGYYYLNNFDNILNSFVTLFELTVVNNWYIIMEGVTSQTSHWSRLYFMTFYIVTMVVMTIIVAFILEAFVFRMNYSRKNQDSEVDGGITLEKEISKEELVAVLELYREARGASSDVTRLLETLSQMERYQQHSMVFLGRRSRTKSDLSLKMYQEEIQEWYEEHAREQEQQRQLSSSAAPAAQQPPGSRQRSQTVT

SEQ ID NO: 339 - DNA, 2428 bp, Homo sapiens
  CDS (12)..(788)
acctggccgccatgcgcctctcctcctccccacctcgtggcccgcagcagctctccagctttggctccgtggactggctctcccagagcagctgctcagggccgacccacacccccaggcctgccgacttctccctggggagcctccctggcccaggccagacatccggcgcccgggagccccctcaggccgtcagcatcaaggaggccgccgggtcctcaaatctgcctgcgccggagaggaccatggccgggttgagtaaggagccaaataccttgcgggccccccgtgtccgcacagccttcaccatggagcaggtccgcaccttggagggcgtcttccagcaccaccagtacctgagccctctggagcggaagaggctggccagggagatgcagctctcagaggtccagataaaaacctggtttcagaatcgccgcatgaaacacaaacggcaaatgcaggacccccagctgcacagccccttctcggggtctctccatgcgcccccagctttctactcaacgtcttctggccttgccaatggcctgcagctgctgtgcccttgggcacccctgtccgggccccaggctctgatgctgccccctggctccttctggggtctctgccaagtggcacaagaggccctggcatctgcgggagcttcctgctgcgggcagcctctggcgtcccacccccctaccccaggccggccttcgctgggaccagccctgtccacggggccccggggcctgtgtgctatgccacagacgggggatgcattttgaggaggcacctctgactcccacactcgcggtcttgctgatcgcacctggctcctacctggaggactcagttgttctgtttacatcctggtggcacctctcaccctgacccacacaaaggttctggagattactggagaatatatataaatatatatatgtacgtatatatgtaaatacacatatacgtatatataaatatatatatacatatgtgtgtgtatatatatatatatttttttttttttttttttttttgagacggagtgttgctctgtcacccaggctggagtgcaatgacgcaatctcggctcactgcaacctccgcctcctgggttcaagcgattctccagcctcagcctcccgagtagctgggattacagacacccgccaccacgcccggctaattttttctatttttagtagaaatggggtttcaccatgttagccaggctggtctcaaactcctgaccctgtgatccgcccgcctcggcctcccaaagtgctgggattacaggcatgagccactgcacccggccctgagaatatatttattaaagccacctcttcactgaaagttaccgaaagagtcggtttaggaaggaaacgaagggtcagtgaacagagtcaaatgcagaagtgggcttgtcatgggtagggctttcggcgtacgataaaaggatcatttgttttttaaaaggggttggaaaaactggttttccagttggaaacagtaaaggttgtaagctttgtgtgtacaaaagaaaacagggaatgcaggtgtgtttatagcgttgtggttcaagtccctcttaacaagaactccaaagctggaaagcaggagggaacaaaggtgaacatgaaggcgaggatgctggggccctgcagtgcgctctaggctgtgcgtgagccgggactgtacccacagcttgctgagggctgctcttcttgggccagggaaagcagggcagccgggacctgcggctgtgcctggactgaagctgtcccgcaggtccccaccctccaacacgtgctcacctgtccccctcctcgcagcagcctcgggacaaaacaatgactcaaggacagcacttctcgcagaaggtctggaagtgcccagaatgggaggcacggaagcccctcccggggaggactcccgcgttgatggaccgttcttggtgcagactcctgactgcgtgcatgaaacctgagacaagtgcaattccttccatgtcgccccagagtgcccaggaggcaggcagtgcggggtgcccaggcagacgggttcagcctgcagaactggaggcgacctgtgaaacccacccgggcaccccaacaggaacagaagcgtggtcctgcggctgcgtccccagcgagtttcactttccccttgctcgtttctcccttgttgtaagtgtttacaactggcatgtgcttttaaacgtcaggtaagaggggaacagctgctgtacatcgtcctggcgagtgacaatgtgacagaagcctgggcgaggccctcggagggcagcagctggacaggggctactgggtttggcctggacagcactgatttgtggatgtggatgggggcacgttgtccgtgataaaagtacaagtgcccctcacaaaaaaaaaaaaaaaaa

SEQ ID NO: 340 - protein, 258 aa, Homo sapiens
MRLSSSPPRGPQQLSSFGSVDWLSQSSCSGPTHTPRPADFSLGSLPGPGQTSGAREPPQAVSIKEAAGSSNLPAPERTMAGLSKEPNTLRAPRVRTAFTMEQVRTLEGVFQHHQYLSPLERKRLAREMQLSEVQIKTWFQNRRMKHKRQMQDPQLHSPFSGSLHAPPAFYSTSSGLANGLQLLCPWAPLSGPQALMLPPGSFWGLCQVAQEALASAGASCCGQPLASHPPTPGRPSLGPALSTGPRGLCAMPQTGDAF

SEQ ID NO: 341 - DNA, 7578 bp, Homo sapiens
  CDS (9)..(3245)
tacgggaaatgtttggtgcagcatccagaatggacaccactgctgtctgcaccgggggagtgacagagagtcgagggattgtggatagcctgcagaagttttcctcgctccctgcttacctccccacgaacttgcacatctccaatgcagaggagtcctttttccttaaagaagccaaccaagacctcacaaggaactccagtctgcaggcccgggtggagccattcttcatctaccgagccaggacaccccctattatcaatgccagctatggcccattttcagtggagaagataatcccccaggagctcctgttgacatctacagcctttggaaacatggacaaatttcccttcaactggaaattgaaatcccacatccttgacagctccatctactccaacagacccaaagtgcagaccttgttttatgtcactggcatgggctgggatgacagtgaccttacggaagatctaccctgtgtcaagatgtttgctttccctgaggccagggaagtggcagccagctgtcggctgcaaggggccccagggctgtgtgtggctgagctggagctgctgcccgagtggttcagctcaggcctggacctggaaccagaggaggagatcccagccctgctcgggggcaccacgatggagctcttcttcacgctctacccagctgacaaggctggccagtgtcctctggaggaggaaggcaagtgggagaacaatatccactcgggcctggagagcccccagcaagcgtttccagcccgagagaggattgggagtgtggtggtctacccaacccaagatgatctgaagtggtccctggtgagcttggacgagaatgtggtcatctcggtacctctgaatctagtccgggaaggggacacggccacctttttggtctctctgaccagtagctctgtggcagaccagttcactcttagaattaaggcggcagcaggtgtgaagataacggcagtgagagtcagcagtgaggaccaatgggcagtccaggaggaaattgataatggcagcactcagacgtcggccaccctcacctgcatgggccatcgcccggacacgcagagcagggtaaatggatccttctatgagatcttgcaagtggactttggaattgataatagcagtgacctggctggggcccagcagattacctggcaggtggagtacccgattgaggactccatgagtgagctggtcgtctccgagatcttcgtcagccagacaaccttcgtgggcatcgtccctcttgccatggacaccgaggttttgaacactgccattctcactggaaagcctgtttcagttcctgtcaaagtcgtgggggtccaggaggatggttctgtggtcgatgtgtctgagtctgtggaatgcaagtctgccgatgaagatgtcattaaggtttccaacaactgtgattccatttttgtgaatgggaaggaaatgaagagcaaagtggacacgattgtgaacttcacccaccagcacttcacctcccagttcgaggtcactgtctgggcacccaggctccccctgcagattgagatctcagacaccgagctgagccagatcaagggctggaggatcccggttgctgccaacagaaggcctacccgggaaagcgatgacgaggacgatgaggagaagaagggacgaggctgctccctgcagtaccagcacgccacagtgcgtgtcctcacccagtttgtggccgagtcacctgacttagggcagctgacctacatgctgggccccgactggcagtttgacatcactgaccttgtgaccgagttcatgaaggtggaggagccgaaaatcgctcagttacaggacggcaggaccctggctggtcgggagccgggaataaccacggtgcaggtcctctcgccgttgtctgactccatcctggctgagaagacggtgattgtcctggatgaccgagtcaccatcgcggagctgggagtgcagctcgtagctggcatgtctctctccctgcagccacaccgagcagacaaaagggccatcgtctccacagctgctgccctggatgttcttcagtccccacagcaggaagcaatagtaagttcttggattttgttcagtgatggttcggtgacacctttagacatttacgatcctaaggattattctgttactgtctcatcattggatgaaatggtggtgtctgtccaggcaaaccttgagtccaaatggccaattgtggttgcagagggtgaaggacaagggcctttgattaagttagaaatgatgataagtgaaccttgtcagaagaccaagaggaagagtgttcttgccgtgggtaaaggaaatgtcaaggtcaaattcgaaccaagtagtgatgagcaccaaggaggcagcaatgatattgagggcataaatcgggaatataaagaccacctcagtaattccatagagcgcgaaggaaaccaggagagagcagtccaggaatggttccaccgtggcacacctgttggccaagaggaaagtaccaacaaaagcacaaccccccagtctcccatggaagggaagaataagttactcaaaagtggtggtccagatgcctttacaagcttccccactcaagggaagtcaccggaccccaataatcctagtgacctcacagtgacctcaagggggctaacggacttggagattggcatgtatgccttgctctgcgtcttctgtctggccattctggtcttcttgatcaactgcgtggcgtttgcctggaaatacagacacaaaaggtttgctgtgagtgagcagggcaacatcccccattcccacgactgggtctggcttgggaatgaagtggaacttttggagaaccctgttgacattacactcccatcagaggagtgcacaaccatgatagacaggggcctgcagttcgaggagaggaacttccttctgaatggcagttcccagaagacttttcatagtcaactactcagaccctctgactatgtctatgagaaagaaattaaaaatgaacctatgaattcttcgggcccaaagaggaagagagtcaagttcacttcctacaccaccatcctcccagaggacggcggcccatacaccaactccatcctgtttgacagcgatgataacatcaagtgggtctgccaagatatggggctgggggattcacaggactttagagactatatggaaagtctgcaagaccagatgtaaactcctttcttatgtttgtattcacctttatgccttctgttttttgaatgctggagcagtgagtttgatcagcaataggggatgatttaacaaagtttgatttgtggaggtctggtgggattcatttctaagcaggtaaaagaggtttggagagctatagaagctgggttttaagtttggaaatgcctctaaaacagccacatgtggggactggagaaattctaagacaacagttttatggactgcctggtacgagctcagtgcaaatgtattaaacctgaccccacagacattgttagtcatctcgtgacaaatggccatgtggaattagaaaagatttgggtgttgatttttctatttctagaccttttaaagcacagtggacacttattgccccttggcctgagtttagacatacatgaaagatgactgaatgtagctatcctgatttgtcatgagcgctgctcattatttttatatacatttgcacctgcacctgttcctttgacctctggaattctttttgaaacatgaagagaagaaatttcagtcttttccttgagctctgtttgatttacacatgagttttcttccctgggatttgccatgccatgttatttcctgggtctccatgcaggatgtcaggtttttccagttttctgcacttcatcatctagggatggtatccaagaagcttattctcactttgttttttccttccttttgttgttgaactttcttgtataacactgggacaaagggttttacttaaaatgttaatatacagtgagggagggccatctctttactgttttctatgtgaagtttcaaacatttggaaaaaagttgtcaatcacaaacatttatttttattctctgcttgttgaaaactcatggggaactcctggagtgcatttctgagggtaaaaaggccccaacatagctgtatttatacaagtgctttgtggccaacacaatttactatccaaactgaagtcttaaagtagaattgacctacacagaaaggaaattgcctaggcaatagatgcagattacactttccattttaccagaacaaaagtttttttttttttaaataagtagaatgacagttcaagttagcaatatatagaaatccatccatacaatgaccaaaataaataaataaataaaactcaatcatgactttggcagagataaaacattgacaagggtgtgcatttgtggagagaagcagtgggtttccccccaaaatccatacaaataaatgactattccagaactcaagaagcagctattatagaaaaaaaaattaaaaaccacagctattgaaaaattaaaacggcaagagaaaaaaagaaacaactcctgcataatgtttaaataaaaatgttattttaatagcatcatgaatggtcttaaggcaaaaatttcagattagcaaaatgtgatgacatatttattaagattgtattattggaaatgtagacactggactagtatgcctcattatgagctttactgagccatttgcatctctaagaaatatgattttaaaggcccaaagtaggaaggatctgcagggggtcacctgaagcagtgccctgactccaaatggctgataactgagctaatccaaggagaggcgttcagttgttctcttattatagatttccttgggtgggaacatgacaaccccgcctcctctagccatgacgtggcagccaaaaagttcttcctgtatctctggcccacaggactgtagtgtgtttgggaacagtgctgaaattgcaagtgatgtaggcctgacctccagagcccagcgttcagttagttgtataaaatggggcttaggaaccgaagctgatgaagttccaaaagtagttcagtttgatgggataaggaagcaaggagagccaggcattagctgcaaaaggagcttgcagagagatggctgacactttatgggaagattcctcagtcagccaaaagcttttcaaagagtttggtgcagaggtagctcagagccaaccatccaggaccgaagaaagctcatgtgctgattgacacatagctatccaggtgagtcggctccttctatgaggcttttcaatcgtctctccctttggatctctggcattccagaaagactgggaattcatttctgaaaatgatgaacctccgctgaaacggggaggaaatctcttacacacatacagcagggtcctgcccactggtaaagtgagacgttgggtagggggtgtaactggggaggaggtgaaggaaattatccctgccatggggagtgttattcaggaacataaaaattagagcattccctctgatggcagtgcttgacggggtgcagggaacaaactggggagcgttcaaacatgccagtggtttctcagcagggctggaaactggccacagtcctgaagatgcttcttgtgacaacttagagtcactgggagtcacacagctcctgtgtagccgcctttgctcctctgtgttaaaacccagtcagttcaaaataacaatcaaatggaaggccatgggggaagggttccttccaccatataacccacacccagatgtatataaacgcatatacatacatatacccgtgtgtgtgtgtgtgtgtgtgtgtgtgtgtgtgaatactgaagagccagacaacaaactatttagtaagaatcaacagtgactgtcaattgttctcagatttggcatggatactatttctcatgaaataatgtcattaaagtatttcctcctctaaatatttcctgaagatcataaaccatgggttatagcaccttgttttccagctagtcaatatacaactattaggtgctgtgccccaaaatatctaaaatgggggtaaagatataaactattaagccatgaaatctaattttctggggaccatgcatttgcctggattttccaggattttatggctgatagacccaaattattagtcttgataaacaacctgaaccaaacatttataaagtcccttcctctcccatgggaatggaatgctcagactcctgctgagggagacaccagcaagcctcttgagaaggcaccagacagtgaactctgtggtcacatgaagggaggttcagatgctagacgaccagcgtatgacctggaaccattgaggattgcaaccgctgcctccagggtccagatgtgctgcagtagagggcagagcacaggaatcaagaagcagctgccacaccaaagaactgatgcttaaacacacaggtgtgttgcatttgagagaaggcaagaagaaaagacaatagaaggttaccctggaaaaacaacacctagcaaacctcagaatactccatgtgtcccaagagaaggaataattgtctttctagctgttatatattgcacactggccaggataaattcccagactataataatcctgactatgtagacggaagtttctatttataaagtcatgcagggggaaagttgattaatttttgtcccattgccacatctgtagactaagtaatttttaacttgctaacttttagaatgtccacctttgtgcattttggtagcattcttgtttcattattttagaaaggggtcttcccattactgggatgtcggggccctgtcagagaactattattaaggctctgtgagggaactgttcagtctcacagcaaggaccacagagcgtggtttcatctgaaccctacaagtcagggacaccagtgtgttttctactcgagttacctaaaaatggtctcaattttccatttcattctctgtaaatgacacaatagatggtttatagactcagcagccctcaccttttattaaaattatatatgtgtgatgtaatgcatatcacctgtcatgtaaagggacggtatggatggtggaaaagttatgctaaaatatggattgcagatatttttgtatgtaatataggcaatataatgaaacaccgagttttttaaagtgaaagcatgcaaaatcgtagcttttaaatgtacagacatcccactcaaaaatatctaaactgatagtgggaaaaacatttgagacctagtaacatcatgaaatgcactgaatttggaattctggcctagaaaggctgtggcttatgttgggattgatgatggaatctgccagaacattttcatcttattcttcttgacttttggatttttttcttttctttttttctggaaatatttcggaaataaagtgacttcatttttcagcataaaagtatattctaaccacagggtaacacatcgtttttaacatgaaaataaacatttaaacattc

SEQ ID NO: 342 - protein, 1078 aa, Homo sapiens
MFGAASRMDTTAVCTGGVTESRGIVDSLQKFSSLPAYLPTNLHISNAEESFFLKEANQDLTRNSSLQARVEPFFIYRARTPPIINASYGPFSVEKIIPQELLLTSTAFGNMDKFPFNWKLKSHILDSSIYSNRPKVQTLFYVTGMGWDDSDLTEDLPCVKMFAFPEAREVAASCRLQGAPGLCVAELELLPEWFSSGLDLEPEEEIPALLGGTTMELFFTLYPADKAGQCPLEEEGKWENNIHSGLESPQQAFPARERIGSVVVYPTQDDLKWSLVSLDENVVISVPLNLVREGDTATFLVSLTSSSVADQFTLRIKAAAGVKITAVRVSSEDQWAVQEEIDNGSTQTSATLTCMGHRPDTQSRVNGSFYEILQVDFGIDNSSDLAGAQQITWQVEYPIEDSMSELVVSEIFVSQTTFVGIVPLAMDTEVLNTAILTGKPVSVPVKVVGVQEDGSVVDVSESVECKSADEDVIKVSNNCDSIFVNGKEMKSKVDTIVNFTHQHFTSQFEVTVWAPRLPLQIEISDTELSQIKGWRIPVAANRRPTRESDDEDDEEKKGRGCSLQYQHATVRVLTQFVAESPDLGQLTYMLGPDWQFDITDLVTEFMKVEEPKIAQLQDGRTLAGREPGITTVQVLSPLSDSILAEKTVIVLDDRVTIAELGVQLVAGMSLSLQPHRADKRAIVSTAAALDVLQSPQQEAIVSSWILFSDGSVTPLDIYDPKDYSVTVSSLDEMVVSVQANLESKWPIVVAEGEGQGPLIKLEMMISEPCQKTKRKSVLAVGKGNVKVKFEPSSDEHQGGSNDIEGINREYKDHLSNSIEREGNQERAVQEWFHRGTPVGQEESTNKSTTPQSPMEGKNKLLKSGGPDAFTSFPTQGKSPDPNNPSDLTVTSRGLTDLEIGMYALLCVFCLAILVFLINCVAFAWKYRHKRFAVSEQGNIPHSHDWVWLGNEVELLENPVDITLPSEECTTMIDRGLQFEERNFLLNGSSQKTFHSQLLRPSDYVYEKEIKNEPMNSSGPKRKRVKFTSYTTILPEDGGPYTNSILFDSDDNIKWVCQDMGLGDSQDFRDYMESLQDQM

SEQ ID NO: 343 - DNA, 1613 bp, Homo sapiens
  CDS (21)..(833)
gaggagcagggccgggcgccatggcaccgtggggcaagcggctggctggcgtgcgcggggtgctgcttgacatctcgggcgtgctgtacgacagcggcgcgggcggcggcacggccatcgccggctcggtggaggcggtggccagactgaagcgttcccggctgaaggtgaggttctgcaccaacgagtcgcagaagtcccgggcagagctggtggggcagcttcagaggctgggatttgacatctctgagcaggaggtgaccgccccggcaccagctgcctgccagatcctgaaggagcgaggcctgcgaccatacctgctcatccatgacggagtccgctcagaatttgatcagatcgacacatccaacccaaactgtgtggtaattgcagacgcaggagaaagcttttcttatcaaaacatgaataacgccttccaggtgctcatggagctggaaaaacctgtgctcatatcactgggaagagggcgttactacaaggagacctctggcctgatgctggacgttggtccctacatgaaggcgcttgagtatgcctgtggcatcaaagccgaggtggtggggaagccttctcctgagtttttcaagtctgccctgcaagcgataggagtggaagcccaccaggccgtcatgattggggacgatatcgtgggcgacgtcggcggtgcccagcggtgtggaatgagagcgctgcaggtgcgcaccgggaagttcaggcccagtgacgagcaccatccggaagtgaaggctgatgggtacgtggacaacctcgcagaggcagtggacctgctgctgcagcacgccgacaagtgatggcctcctgggagagccccgcctcctccacccctgcctctcctccacccctgcctcccctccacccctgcctctcctccacccgcccaggagagccccacctcctccacccctgcctctcctccacccctgcctcccctccacctgccccagtgcccagaccaaccaaggccctgacagccctgccttctgccctctgccctgcatgggcaggcatttgttccctacctgggtggcctgctcccctgcctgggccctgacttcagctccctgtagtgaagtccaggagggtgggacaggcctgtcaggcctctgggaatctcccaaatcccagaactcaccactcaccatgggcctttaaatgcagtaaactccacctaaccagattcaggggcactatgcccactgcctcctcttcagactctttgcatttcagtgaagagcctggaagaaacccaggggcctcctatgcacagatcttgcagcccagaaccaagtcagcctccctgcgactgcccaggcacactgcccaccaccccacccccgaaacaatgccagcccgctgctttttctatcctcccagtcacctttgcagacaaagaccaggggcagctcccgagggcactgtgaaggctcccatgccacacagtgagaactgtagcctctgcgtccaaggcacacagggtactttctggacccactgctggacagacttgaaggtgtcatgcccggtgtgtgcaggaggaaactaacagttcagtaaactctgccttgaccagc

SEQ ID NO: 344 - protein, 270 aa, Homo sapiens
MAPWGKRLAGVRGVLLDISGVLYDSGAGGGTAIAGSVEAVARLKRSRLKVRFCTNESQKSRAELVGQLQRLGFDISEQEVTAPAPAACQILKERGLRPYLLIHDGVRSEFDQIDTSNPNCVVIADAGESFSYQNMNNAFQVLMELEKPVLISLGRGRYYKETSGLMLDVGPYMKALEYACGIKAEVVGKPSPEFFKSALQAIGVEAHQAVMIGDDIVGDVGGAQRCGMRALQVRTGKFRPSDEHHPEVKADGYVDNLAEAVDLLLQHADK

SEQ ID NO: 345 - DNA, 1059 bp, Homo sapiens
  CDS (802)..(933)
ctcacagcatggctgccttgggtactcggacttcacgtggaaggccagggctccgagagcaaatgccccagcaagacagaagctcagccgcctttgatgacctagaagctaggcagcatccattgtactgccttctatgggttgtgagtgagtcccaaacctgccttgactcaaggaaacggaattaggctctacgtcttgactaggtagtggcgaagttctggaagcacatgagtaggagatactgtgacggtttcatctttggaaaataccatctagcacacctgaatctgctttcagggggtgtaaggggatttccatggcaaaatttgaagccacatgtggtcactgctttgtactgaggaaacaaagtgctctgggcatccagaaagggggtacgttttttcttactgggataaatctggctgcattttagctaatcctggaaaattgatcgacaaaagcaaaggaccaagaaagctgcttatatcagtgtctcctccaccctcagcctccagtagcatccctacgttttacaattttatttatgtcactttaaataaggacattgagagggaaaaggcctcatcgacataccaactacaggccaggtggaccttcggtgcacacacaccccagcgcccacagagatccaggcctcctgtgtatgaatgtgtgccatgaatttagacctatttctcgccttccgggctctctattcctcatcctccatccaagtggccatcttgtgcaggccctgaaagcagcagatctcacctgcattggaggatgagacgccacatgaagaagaaagaagacgccacagacagcagcgcagtaccaccttccagagatgtgagtgtgaccgtctttgaccttctagcccagctgctttccctgaatgcaatgcatgagcaggccaggcaaaactagagagggaagctgcccagctaacccacagaattatgagagataaaaaatcattgtcttaagccactaagtctgttatgcagcaatatatagcattcatacaaaaaaaaaaaaaaaaaaaaaaaaaaa

SEQ ID NO: 346 - protein, 43 aa, Homo sapiens
MKKKEDATDSSAVPPSRDVSVTVFDLLAQLLSLNAMHEQARQN

SEQ ID NO: 347 - DNA, 6266 bp, Homo sapiens
  CDS (32)..(5776)
ggttgcctacgcgctggtgggccgtgggaagatggcggacggaaagggagacgccgccgctgtcgccggggctggggctgaggctccggcggtagcgggagccggagatggagtcgagactgagtccatggttcggggtcatcgccccgtatctccagcgccgggagcctcgggactgcggccgtgtctgtggcagctggagacagagctgagggagcaagaggtgtcggaggtctcatctttgaactactgccggagcttctgccagaccttattgcaatatgcaagcaacaagaatgcatcagaacatattgtgtatcttctggaggtatatcgacttgccatccaaagctttgccagtgcacgtccatacttaactactgaatgtgaagatgtcctcttagtgcttggcagattagtactgagttgtttcgaattactgctttcagtgtctgaaagtgaactgccatgtgaagtctggctaccattccttcagtctctacaggagtcacatgatgcattattggaatttgggaataataacctacaaatattggttcatgttaccaaggaaggggtgtggaaaaacccagttcttcttaaaattctgtctcaacagccagtagaaacggaggaagtcaataaattgattgcacaagaaggaccttcctttctgcaaatgcgaataaaacatttgttgaaatctaactgcatcccccaggctactgctttatcaaaactatgtgcagaatctaaagaaatttcaaatgtgtcatcttttcagcaagcctatatcacatgtttatgttctatgctccctaatgaagatgctattaaggagattgcaaaggtcgactgcaaggaagtactagacatcatttgtaatctggaatctgaggggcaggataacacagcatttgttctttgtacgacttaccttacccagcagctccaaactgcaagtgtatattgttcttgggaactgactcttttttggagtaaactgcaaagaagaattgacccttctttagatacttttttggagcgctgtcgtcagtttggtgtcatagctaaaacgcagcagcatttattttgcctcattagagttatacaaactgaagcacaagatgctggtcttggggtgtcaattttactgtgtgtcagagctcttcaactcagatcaagtgaagatgaggaaatgaaggcatcagtttgtaaaacaattgcctgtcttttaccagaagatttagaagttagacgagcctgtcagcttacagaattcttaattgaacccagtttggatggatttaatatgttagaagaactatatttgcaaccagatcaaaaatttgatgaagaaaatgcaccggttccaaattctcttcgatgtgagctcttactagctttaaaagcccactggccttttgatcctgagttttgggactggaaaactttaaaacgacactgccaccaacttttaggacaagaagcctcagattctgatgatgatttaagtggctatgaaatgtccattaatgacacagatgttttagagtcatttctcagtgactatgatgagggtaaagaagataaacaatatagaagaagagatttgacagatcagcataaggagaaaagagacaaaaaacctattggctcttctgaaagatatcagaggtggcttcagtacaagtttttctgtttgttatgtaagcgggaatgtatagaggctagaattcttcatcattctaagatgcatatggaagatggaatttacacctgtccagtttgtattaaaaaatttaagagaaaagaaatgtttgttcctcatgtgatggagcatgttaaaatgccaccaagcagaagggaccgctctaaaaagaaattactgttaaaaggctctcaaaagggtatttgtcctaagagcccctctgcaatcccagagcaaaaccattcattgaatgaccaagccaaaggagagtctcatgaatatgtcacattcagcaaattagaagattgccacctgcaagacagagatttgtatccatgtcccggtacagactgttcccgtgtgtttaagcaatttaaatacttaagtgtgcatcttaaagctgaacaccaaaataatgatgaaaatgccaagcactacttggatatgaaaaatagaagagagaagtgtacttactgtcgacgacattttatgtctgcttttcaccttcgagagcacgaacaagtgcattgtgggcctcagccttatatgtgtgtatctatagattgctatgctaggtttggatcagtaaatgaactacttaaccataaacaaaagcatgacgatctgcgttacaaatgtgaattaaatggctgtaatattgttttcagtgacttgggacagctttaccaccatgaagcacaacactttagggatgcatcttacacatgcaacttccttggctgtaaaaagttctattactccaaaattgaataccagaatcacctctcaatgcataatgttgaaaattcaaatggagacataaagaaatcagtgaaacttgaggagtctgcaacaggtgaaaagcaagattgtattaatcagccccatctacttaaccaaactgataaatcacatttacctgaagatcttttctgtgcagaatcagctaattctcaaatagatacagaaactgcagaaaacctgaaagaaaacagtgacagtaattctagtgatcagttaagtcatagctcttcagcttcaatgaatgaagagctaattgacacactagatcactctgaaactatgcaggatgtattgttatctaatgagaaagtctttgggccctccagtttaaaagaaaaatgttccagtatggcagtttgttttgacgggactaagtttacctgtggttttgatggctgtggttccacatacaaaaatgcaagaggaatgcagaaacatttacggaaggttcatccataccatttcaagcccaaaaagataaagacgaaagatctgtttccctctttgggtaatgaacataatcagacaactgaaaagttggatgcagaacctaaaccctgctcagatacaaacagtgactccccagatgaaggtctagatcacaatattcacattaaatgtaaacgagaacatcaaggttattcctcagaatcctccatttgtgcttctaaaaggccctgtacagaggataccatgttggaacttctgttacgcttgaaacatttaagcttgaaaaactcaataacacatggatctttctcagggtcattgcaggggtacccatccagtggtgctaagtctcttcagtcagtttcatctatctcagaccttaattttcagaatcaagatgaaaacatgccaagtcagtaccttgcacagttggcggctaagccgtttttctgtgagcttcaaggatgcaaatatgaatttgtgaccagagaggctctgttaatgcattatcttaaaaagcataattattcaaaagaaaaagtccttcagttaaccatgttccaacatcggtattccccatttcagtgtcatatttgccaaaggtcatttacaagaaaaacacaccttaggattcattataaaaataaacatcaaattggcagtgacagagcaactcacaaactattagataatgaaaagtgtgatcatgaaggcccatgttcagtagataggttgaaaggtgattgttctgcagaacttggaggtgatcccagtagtaactctgagaaaccacactgtcatcctaaaaaggatgaatgtagttctgaaacagatttggaatcatcttgtgaagaaacagaaagtaaaacatctgacatttcatcaccaataggcagccatagagaagaacaagaaggaagagagggcagaggtagcaggcgaactgttgctaaaggaaatctgtgttatattttgaataaataccacaaaccattccattgtattcataaaacttgcaactcctcattcaccaatctaaaaggcttaattcgccattacagaactgtacatcagtacaacaaagaacagttatgtttggagaaagacaaagcaagaaccaaaagggaacttgtcaaatgtaaaaagatatttgcttgcaaatataaggaatgtaataaacgcttcctgtgttccaaagctcttgctaagcactgtagtgattctcataacctagaccatattgaagagcctaaagtactttccgaagctggatctgcagcaaggttttcttgtaaccagcctcagtgccctgctgttttttatacattcaacaagttgaagcaccacttgatggaacagcataatattgaaggggaaatacattcagattatgaaattcattgtgatcttaatggctgtggccagattttcacccatcgcagtaattactcacaacatgtatattaccgacataaagactattatgatgatttgtttagaagccagaaagtagcaaatgagagactactaaggagtgaaaaggtatgtcaaacagctgatactcaggggcatgaacatcagaccaccaggagatcatttaatgctaagtctaaaaaatgtggcttaatcaaagaaaagaaagccccaataagttttaaaaccagagctgaggccctccatatgtgtgtggagcactctgagcacacacagtacccctgcatggttcaaggatgcttatctgtggtgaagttggagagcagcattgtgaggcattacaaacgcactcatcagatgagtagtgcctatttagagcaacagatggagaatcttgttgtttgcgttaagtacggtaccaaaattaaggaggaacccccttctgaagcagatccctgtataaagaaagaagaaaatagaagctgtgaatcagagcgcacagaacacagccattccccgggtgacagtagtgcacccatccagaacactgattgctgtcattcaagtgaaagggatggaggtcagaaagggtgcatagaaagcagctcagtatttgatgcagatactctgctctacaggggaactttgaaatgtaatcatagttccaaaaccacttccctagaacagtgtaatatagttcagcctcctcctccttgtaaaatagaaaattccatacctaatcccaatgggactgaaagtgggacttatttcacaagtttccagctgcctttaccaaggatcaaagaatcagaaactaggcagcatagttcagggcaagaaaacactgtaaaaaatccaacccatgtcccaaaagagaattttaggaaacattcacagccccggtcatttgatttgaagacttacaaacctatgggatttgaatcttcatttctgaaatttattcaggaaagtgaagagaaagaagatgattttgatgattgggagccttcagagcacttaacattaagtaattcttcacagtccagtaatgatttaacagggaatgttgtggcaaataatatggtgaatgacagtgaacctgaagttgacatacctcattcttccagtgactctacaattcatgagaacctgactgcaatcccacctttaatagtagctgaaacaacaacagttccttccttggaaaacctgagggttgtattggacaaagcattaacagactgtggagagcttgccttaaaacagcttcattatcttcggccagtggtggttcttgaaagatctaagttttccacaccaattttagacttatttccaacaaaaaagacagatgagctttgtgtaggaagttcataagtagcaattttgttttagtaacagactggctccaacactgcaacatggggacatttgccaactcgaacaaaggctgagaagcagccacaccgttgtttagggtagaataggctgtgtatttacatgaatgtataatatctatgtcagcagtattggctgagtccattagctctccagttggtttaatgattgggtttatttttgtttgtttgtttattaaaaaaatggaactgtacacttgtttggtgctaattaatacatcaaaatatactggggcttcctttttcaaattaagtgtgcatgattgtatatggaacaaatactaaggtcccagggtgggagggctagggaaagggatatggagttcttacttgacttgaatgtgcacctgagggtgctttgtgtaatatattgtacactacagcatcttatattttttgagttgagtttcaataaattacaatttttcacccaaaaaaaaaaaaaaaaa

SEQ ID NO: 348 - protein, 1914 aa, Homo sapiens
MADGKGDAAAVAGAGAEAPAVAGAGDGVETESMVRGHRPVSPAPGASGLRPCLWQLETELREQEVSEVSSLNYCRSFCQTLLQYASNKNASEHIVYLLEVYRLAIQSFASARPYLTTECEDVLLVLGRLVLSCFELLLSVSESELPCEVWLPFLQSLQESHDALLEFGNNNLQILVHVTKEGVWKNPVLLKILSQQPVETEEVNKLIAQEGPSFLQMRIKHLLKSNCIPQATALSKLCAESKEISNVSSFQQAYITCLCSMLPNEDAIKEIAKVDCKEVLDIICNLESEGQDNTAFVLCTTYLTQQLQTASVYCSWELTLFWSKLQRRIDPSLDTFLERCRQFGVIAKTQQHLFCLIRVIQTEAQDAGLGVSILLCVRALQLRSSEDEEMKASVCKTIACLLPEDLEVRRACQLTEFLIEPSLDGFNMLEELYLQPDQKFDEENAPVPNSLRCELLLALKAHWPFDPEFWDWKTLKRHCHQLLGQEASDSDDDLSGYEMSINDTDVLESFLSDYDEGKEDKQYRRRDLTDQHKEKRDKKPIGSSERYQRWLQYKFFCLLCKRECIEARILHHSKMHMEDGIYTCPVCIKKFKRKEMFVPHVMEHVKMPPSRRDRSKKKLLLKGSQKGICPKSPSAIPEQNHSLNDQAKGESHEYVTFSKLEDCHLQDRDLYPCPGTDCSRVFKQFKYLSVHLKAEHQNNDENAKHYLDMKNRREKCTYCRRHFMSAFHLREHEQVHCGPQPYMCVSIDCYARFGSVNELLNHKQKHDDLRYKCELNGCNIVFSDLGQLYHHEAQHFRDASYTCNFLGCKKFYYSKIEYQNHLSMHNVENSNGDIKKSVKLEESATGEKQDCINQPHLLNQTDKSHLPEDLFCAESANSQIDTETAENLKENSDSNSSDQLSHSSSASMNEELIDTLDHSETMQDVLLSNEKVFGPSSLKEKCSSMAVCFDGTKFTCGFDGCGSTYKNARGMQKHLRKVHPYHFKPKKIKTKDLFPSLGNEHNQTTEKLDAEPKPCSDTNSDSPDEGLDHNIHIKCKREHQGYSSESSICASKRPCTEDTMLELLLRLKHLSLKNSITHGSFSGSLQGYPSSGAKSLQSVSSISDLNFQNQDENMPSQYLAQLAAKPFFCELQGCKYEFVTREALLMHYLKKHNYSKEKVLQLTMFQHRYSPFQCHICQRSFTRKTHLRIHYKNKHQIGSDRATHKLLDNEKCDHEGPCSVDRLKGDCSAELGGDPSSNSEKPHCHPKKDECSSETDLESSCEETESKTSDISSPIGSHREEQEGREGRGSRRTVAKGNLCYILNKYHKPFHCIHKTCNSSFTNLKGLIRHYRTVHQYNKEQLCLEKDKARTKRELVKCKKIFACKYKECNKRFLCSKALAKHCSDSHNLDHIEEPKVLSEAGSAARFSCNQPQCPAVFYTFNKLKHHLMEQHNIEGEIHSDYEIHCDLNGCGQIFTHRSNYSQHVYYRHKDYYDDLFRSQKVANERLLRSEKVCQTADTQGHEHQTTRRSFNAKSKKCGLIKEKKAPISFKTRAEALHMCVEHSEHTQYPCMVQGCLSVVKLESSIVRHYKRTHQMSSAYLEQQMENLVVCVKYGTKIKEEPPSEADPCIKKEENRSCESERTEHSHSPGDSSAPIQNTDCCHSSERDGGQKGCIESSSVFDADTLLYRGTLKCNHSSKTTSLEQCNIVQPPPPCKIENSIPNPNGTESGTYFTSFQLPLPRIKESETRQHSSGQENTVKNPTHVPKENFRKHSQPRSFDLKTYKPMGFESSFLKFIQESEEKEDDFDDWEPSEHLTLSNSSQSSNDLTGNVVANNMVNDSEPEVDIPHSSSDSTIHENLTAIPPLIVAETTTVPSLENLRVVLDKALTDCGELALKQLHYLRPVVVLERSKFSTPILDLFPTKKTDELCVGSS

SEQ ID NO: 349 - DNA, 4937 bp, Homo sapiens
  CDS (114)..(965)
ctccgcactgctcactcccgcgcagtgaggttggcacagccaccgctctgtggctcgcttggttcccttagtcccgagcgctcgcccactgcagattcctttcccgtgcagacatggcctctggcaccaccaccaccgccgtgaagattggaataattggtggaacaggcctggatgatccagaaattttagaaggaagaactgaaaaatatgtggatactccatttggcaagccatctgatgccttaattttggggaagataaaaaatgttgattgcgtcctccttgcaaggcatggaaggcagcacaccatcatgccttcaaaggtcaactaccaggcgaacatctgggctttgaaggaagagggctgtacacatgtcatagtgaccacagcttgtggctccttgagggaggagattcagcccggcgatattgtcattattgatcagttcattgacaggaccactatgagacctcagtccttctatgatggaagtcattcttgtgccagaggagtgtgccatattccaatggctgagccgttttgccccaaaacgagagaggttcttatagagactgctaagaagctaggactccggtgccactcaaaggggacaatggtcacaatcgagggacctcgttttagctcccgggcagaaagcttcatgttccgcacctggggggcggatgttatcaacatgaccacagttccagaggtggttcttgctaaggaggctggaatttgttacgcaagtatcgccatggcgacagattatgactgctggaaggagcacgaggaagcagtttcggtggaccgggtcttaaagaccctgaaagaaaacgctaataaagccaaaagcttactgctcactaccatacctcagatagggtccacagaatggtcagaaaccctccataacctgaagaatatggcccagttttctgttttattaccaagacattaaagtagcatggctgcccaggagaaaagaagacattctaattccagtcattttgggaattcctgcttaacttgaaaaaaatatgggaaagacatgcagctttcatgcccttgcctatcaaagagtatgttgtaagaaagacaagacattgtgtgtattagagactcctgaatgatttagacaacttcaaaatacagaagaaaagcaaatgactagtaaacatgtgggaaaaaatattacattttaagggggaaaaaaaaacccaccattctcttctccccctattaaatttgcaacaataaagggtggagggtaatctctactttcctatactgccaaagaatgtgaggaagaaatgggactctttggttatttattgatgcgactgtaaattggtacagtatttctggagggcaatttggtaaaatgcatcaaaagacttaaaaatacggacgtactttgtgctgggaactctacatctagcaatttctctttaaaaccatatcagagatgcatacaaagaattatatataaagaagggtgtttaataatgatagttataataataaataattgaaacaatctgaatcccttgcaattggaggtaaattatgtcttagttataattagattgtgaatcagccaactgaaaatcctttttgcatatttcaatgtcctaaaaagacacggttgctctatatatgaagtgaaaaaaggatatggtagcattttatagtactagttttgctttaaaatgctatgtaaatatacaaaaaaactagaaagaaatatatataaccttgttattgtatttgggggagggatactgggataatttttattttctttgaatctttctgtgtcttcacatttttctacagtgaatttaatcaaatagtaaagttgttgtaaaaataaaagtggatttagaaagatccagttcttgaaaacactgtttctggtaatgaagcagaatttaagttggtaatattaaggtgaatgtcatttaagggagttacatctttattctgctaaagaagaggatcattgatttctgtacagtcagaacagtacttgggtttgcaacagctttctgagaaaagctaggtgtttaatagtttaactgaaagtttaactatttaaaagactaaatgcacattttatggtatctgatattttaaaaagtaatgtttgattctcctttttatgagttaaattattttatacgagttggtaatttttgctttttaataaagtggaagcttgcttttttaactctttttttattgttattttatagaaatgctttttgttggccgggcacagttgctcatccatgtaatcccagcactgtgggaggccgagacgggtggatcacaaggtcaggagatcgagaccatcctggctaatgcgttgaaactccgtctctactaaaaatacaaaaaattagctgggcgtggtggtgggcacctgtagtcccagctactcaggaggctgaggcaggagaatggtgtgaacctgggaggtggagcttgcagtgagcagagcttgcagtgagacgagcttgtgccactgcactccagcctgggcaacagagtaagactcagtctcaaaaaaaaaaaaaagagtgaaatgctttttgtttgcttcagttttttatcatggggagatctttttcctcagaattgttttcttttcactgtaggctattacaggatacttcaggatcaagatacagaaccttttatttaaagagtttgtaaagtcaatgtgtttgtttgtgtctctgagattgacttcaagataataagctgctaattgtaaacaaaacagttaccctccagtattaatatgactcattagtgtgagccatttgggtcaagtatgattatgacccttggacttcctgatgtagtattaaatttcaactctggttatccattagcaatctgtagagaacttaatgaacctgaacccaggcttctctagctctggtaacgtgtgattgttttcactacaatatgatacatagatggtaccttacttttcctcattcttaataggtgtctaagaatgtcagggcaaaagtatgggcatttttcttgctatgttcagaaagtacagttctctccaacttgcagaggtacttttcttgattaaatagccttctctagcaacatcattttcagactaactaaatgaatgcagtatactcttttctttgttctcaatcattcactccttatgcaaagccaatataattttcctcataccttatgcttgaggatattgttgaagaacacttcctggaacacttctcacttgtgatgctgtactaattttttttttttaatttaagctagtatactaagtgaacaccatggtcagttgtgagcattttggtttccgcaaaggatggatggtgagcatcatgggaaagctgtagtttagtgacttagcccttagtgattaatagatttgcatgtacatagaagtctttgttggccttataatctgctgttatatttggcatggattttcatggttttgagaatgacatcctggccctgtggtccccgagggtcatggtccttgtgacctggcccctgttcactgcccccttcgctagcacgagttgctgtgcagggctggaggtagctaccatggcttgtttcaaggaaggaaactctggtacggtggcaccctcaggagtggaggacagtgaacttccttgaagagggagtgactaaggtgacctccaacctgccctgagccagctgccctgcaggtgccacgtgagcctgctctggcatccacaggatgctcctggagcctcttctctggctgctacctcagggcatggttgtggccccaccaacacctattttccaaataattattcattcttgtgacagtggcctgaacatgtttttaattttctcaacaagcatttagccagcacttatccagtgaaacaatttgataaggtttcaaggagtatctgatgggttaggaagtcacgaaatgaggagttcttgccacatttgcagagtccctccttgataaggtttggcggtgtccccacccaaatctcatgttgaattgtagttcccataatccccacatgttgtgggagggacccagtgggaggtaattaaatcatgggggtggttacccccacactgctgttctcatgatactgagttctcacaagtcctgtttgttttataaggggcttttcccccttttgctcaacacttcttcctgccatcatgtgaagaaggacgtgtttgtttccccttctgccacgattgtaagtttcctgaggccttcccagctatgtggaactgtgagttaattaaacctctttcctttataaattacccagtcatgggcagtcctttacagcagcatgagaatggactaatacactcctcaaatgttttgaagattgttgcaccttggaactaccagtgtgcacacaatctggctcaatgtatatattggcccagcaaggcaaagaactgaagttccaggatggaagaacctgtgttctcctcataatagtatagaataattcaagataggcaagaaggacagcagtaaatgaagaccatggaagaaaagaaggaatgccaaagatcgaggaaatctaccaagactagtagggtagtccagaagaagctgtttcagggcctgttgccagctatgcctttgagaacctcgggatcccaaagaatgaggggaatttcttcagaaagacaatctcggcatgcattatttctttgttttgaagattcactcatgttgcatgcatctgtagcttgtgccttttttattgcctagtagtattctgtcatatgcctatcttacaatttgattatctattcacctgttgatgaatgtttgaattttttccatttgaggaattttatgaataaagctgctataagcatgaaaaaaaaaaaaaaaaaa

SEQ ID NO: 350 - protein, 283 aa, Homo sapiens
MASGTTTTAVKIGIIGGTGLDDPEILEGRTEKYVDTPFGKPSDALILGKIKNVDCVLLARHGRQHTIMPSKVNYQANIWALKEEGCTHVIVTTACGSLREEIQPGDIVIIDQFIDRTTMRPQSFYDGSHSCARGVCHIPMAEPFCPKTREVLIETAKKLGLRCHSKGTMVTIEGPRFSSRAESFMFRTWGADVINMTTVPEVVLAKEAGICYASIAMATDYDCWKEHEEAVSVDRVLKTLKENANKAKSLLLTTIPQIGSTEWSETLHNLKNMAQFSVLLPRH

SEQ ID NO: 351 - DNA, 4139 bp, Homo sapiens
  CDS (141)..(1247)
aagaagaccccgttcttccgggaaaatggcgactcccgctcgtgccccggagtcaccgccgtccgcggatccggcgctagtagcggggcctgccgaggaagccgagtgcccgccgccgcgccagcctcagcccgcgcagaatgtgctcgctgccccgcggcttcgagccccaagctcccgaggacttggcgcagcggagtttggtggagctgcgggaaatgttgaagcgccaggagagacttttgcgcaacgaaaaattcatttgcaaattgcccgacaaaggtaaaaagatctttgactcttttgccaaactgaaagctgccattgcagaatgtgaagaagttagaagaaaaagtgaactgtttaaccctgttagtttagactgtaagctaaggcaaaaagcaattgcagaagttgatgtgggtacagataaggcccagaattctgacccgatacttgatacttcatcactagttcctggatgttcctctgtagataacatcaagtcatctcaaacctcacaaaaccagggacttggacgtcctactcttgaaggtgatgaagagacttcagaggttgagtacacagtgaataagggcccagcttccagcaatagagacagggtaccaccttcatctgaagctagtgagcatcacccgcggcatcgtgtttcaagtcaagcggaagatacttccagcagctttgacaacctgtttattgacaggttacagaggatcaccattgcggaccaaggtgaacaacagtcagaagaaaacgcaagtactaagaacttgacaggcctttccagtgggactgagaagaaacctcattacatggaagtgctagaaatgcgagccaaaaacccagtgccccagctgcgtaaatttaaaaccaatgtgttaccttttcgacaaaatgattcatctagtcattgccagaagagtgggtctcctatttcctcagaagagcggcggcgcagggataagcagcatcttgatgacatcacagcagctcggcttctaccacttcaccatatgcccacgcagctgctctccatagaagaatccttggcacttcagaaacagcagaaacagaattatgaggagatgcaagcaaagctcgcagcgcaaaaattagctgaaagactgaatattaaaatgcggagttataatccagaaggggagtcttcagggagataccgagaagtaagggatgaagatgacgattggtcctctgatgaattctgaagataatctcctaaatcactgacgttgagatgtcatcatcttacatcagactttctaactagtatcaagatcagtgtcagatattgttgagggaagtaattttataaagttacacaaaggtagttataaaaaaagcccagtttgtctttcagaaggtgactttcatgtgcttgaaaagtttaatatttgaatattgtgtttaaccacatggtattaaaattttgcaatatattgtgtattggtctgatattttagtatatagtagaacatactttttttttctttaagccaaatgaaaagaggtaactttgcttttttcctttttcttacctatcaaatagcatttattacatgtctttcagtgaaatacttagttgttccaggcacctaaaatcaattaggaagacatagttcccttcttttttgggtaatgaagggagcagtctaaagaattgtatgcatgtttgcatggggttattgagacattggatgtgaaatacctaggaagacatgtatggagaatgcttaacaaatgctcttctcctttttctgtcttcccttaggaagaacgttatctctcttctgattaggaaggacttcccttttgagtagatgctggaaagtggaggttttttttgttggtttgtttgtttggttttgtgtttttttttgagatggggtcttgctctgtcgcccaggctggagtgcagtggcaggatctcggctcactgcaatctaggtggaggtctttttaaataacctcatgttacttcaggcaaatctggtacaggagaagcccaagctaactgagctgggtgaaggcttgtgcatcacctggcttgagttccttgctgtcacagatgataggttcatgtacacaacattaatgtttgataaggaaagcattttttttttgttaaaattgaattgtcagtactttacttttttccccccaaataggtatatatagactgcagaagcttcagtcccatatataaacgttcatgtcattttagaggattatatggttgtctccagagaaattaacttacattatcaaaaaattctttgtctaatatattggagtctttaaaagtgttgaagaataaaatattaattagaacaacttcaaatgctaaggtgatgttttaccgggacttaattaaatacaactttttcctttcgaaaaagactgttcacatttgcttccaggtgtaattattgctttcattccttacccccctcaagcaaatgtgaaaagtatactgacctaagattctcattagttttagttcttaaaacgaatagtaaatgatttcacagcgtaaaatttgatgttatttctggaagctggatgatatggaagagttcatgtgcctggacacacagttccctgtaatcctgccatctagggagataaactctgttaacattttgatgttgtgtttttgcttatttttctatgcatagttatgcatttatattctcaaaaatgaaatcataatgtacattgctttgtagtctgctctatatattgtcaatatgttcccatattaaatattttgctttttagacagctgtaggatattttatttcatgggtataccataactttaagatttatttcctattcagcaatttgattatgtattataatgtaatctgtaaatagtgatatgattaacatcttaatcacatccatagaaaatgacttatttccagaagataccgctctaaaaatgaaattgttaggtgaaagtgtttttgagaatttttatatatattactcactgcagagatcatgttcatttacattcccattagcaatatatccaatgctcagaattgaaaattactacttaaaatctttgcaaattgaataattacagaaaagggctacatttaaaatttgtatttgtttttcttacttagtgaaggttgtgttttttttcatattcattggccatgctatattcattcttttgagaattgctcattcatattttttctgttgcttgcttggagaatttgctctttttttggcatataagttcttaagaatgtccgtcctttgtcatatattgtaactttttttagccttatttgtcatttaacatagtttgtggtatttcagtatagaagttgttttctttaggagtctacctttgtgtatgtgcttgaaagtatttttgtaatccaagaatggataaatgtccttattttcttctagtattttcttatttcacttttacacctatctttaaaaggaatttaaattttgtttatatacattaactaaatcagtacaagtttggggtgaaaaggaaatttttaatccatctcaaatgtatttggttatattatataaggtagggatttgattttatttcgaagaatttaccaattggttcagtatgtgaaaccaccatttcccctctgattagtaatgctatttttatagaatattaaattcttatgtgtcttttgtgtcttaggccaatttctgggccttctgggttttttctacactgtcaataattatcgctttaattggtgttaatatttggtagtacacaggttctcccttgttcttttaaattttgtgaaatataacttacaaataagtacttaaaacagagcttaatgggtaaagcaacagctgtgtaatcacaaactagatgcagaggaggtcttgccagcactccaaaatctctgtgtgtcccctcttgacactcactgtttcccccagagctaactatcctgacgtatggtaattctccctctgtccttttaagaattattttaccagttatgtgtataacaatatggtttacattttgctcacttttgacttatataaaaatagaataatactaaaaaaaaaaaaaaaaa

SEQ ID NO: 352 - protein, 368 aa, Homo sapiens
MCSLPRGFEPQAPEDLAQRSLVELREMLKRQERLLRNEKFICKLPDKGKKIFDSFAKLKAAIAECEEVRRKSELFNPVSLDCKLRQKAIAEVDVGTDKAQNSDPILDTSSLVPGCSSVDNIKSSQTSQNQGLGRPTLEGDEETSEVEYTVNKGPASSNRDRVPPSSEASEHHPRHRVSSQAEDTSSSFDNLFIDRLQRITIADQGEQQSEENASTKNLTGLSSGTEKKPHYMEVLEMRAKNPVPQLRKFKTNVLPFRQNDSSSHCQKSGSPISSEERRRRDKQHLDDITAARLLPLHHMPTQLLSIEESLALQKQQKQNYEEMQAKLAAQKLAERLNIKMRSYNPEGESSGRYREVRDEDDDWSSDEF

SEQ ID NO: 353 - DNA, 1603 bp, Homo sapiens
  CDS (140)..(1081)
cgggacggccgcgggaaaaggcgcgcggaaggggtcctgccaccgcgccacttggcctgcctccgtcccgccgcgccacttggcctgcctccgtcccgccgcgccacttcgcctgcctccgtcccccgcccgccgcgccatgcctgtggccggctcggagctgccgcgccggcccttgccccccgccgcacaggagcgggacgccgagccgcgtccgccgcacggggagctgcagtacctggggcagatccaacacatcctccgctgcggcgtcaggaaggacgaccgcacgggcaccggcaccctgtcggtattcggcatgcaggcgcgctacagcctgagagatgaattccctctgctgacaaccaaacgtgtgttctggaagggtgttttggaggagttgctgtggtttatcaagggatccacaaatgctaaagagctgtcttccaagggagtgaaaatctgggatgccaatggatcccgagactttttggacagcctgggattctccaccagagaagaaggggacttgggcccagtttatggcttccagtggaggcattttggggcagaatacagagatatggaatcagattattcaggacagggagttgaccaactgcaaagagtgattgacaccatcaaaaccaaccctgacgacagaagaatcatcatgtgcgcttggaatccaagagatcttcctctgatggcgctgcctccatgccatgccctctgccagttctatgtggtgaacagtgagctgtcctgccagctgtaccagagatcgggagacatgggcctcggtgtgcctttcaacatcgccagctacgccctgctcacgtacatgattgcgcacatcacgggcctgaagccaggtgactttatacacactttgggagatgcacatatttacctgaatcacatcgagccactgaaaattcagcttcagcgagaacccagacctttcccaaagctcaggattcttcgaaaagttgagaaaattgatgacttcaaagctgaagactttcagattgaagggtacaatccgcatccaactattaaaatggaaatggctgtttagggtgctttcaaaggagctcgaaggatattgtcagtctttaggggttgggctggatgccgaggtaaaagttctttttgctctaaaagaaaaaggaactaggtcaaaaatctgtccgtgacctatcagttattaatttttaaggatgttgccactggcaaatgtaactgtgccagttctttccataataaaaggctttgagttaactcactgagggtatctgacaatgctgaggttatgaacaaagtgaggagaatgaaatgtatgtgctcttagcaaaaacatgtatgtgcatttcaatcccacgtacttataaagaaggttggtgaatttcacaagctatttttggaatatttttagaatattttaagaatttcacaagctattccctcaaatctgagggagctgagtaacaccatcgatcatgatgtagagtgtggttatgaactttaaagttatagttgttttatatgttgctataataaagaagtgttctgcattcgtcaaaaaaaaaaaaaaaaaaaa

SEQ ID NO: 354 - protein, 313 aa, Homo sapiens
MPVAGSELPRRPLPPAAQERDAEPRPPHGELQYLGQIQHILRCGVRKDDRTGTGTLSVFGMQARYSLRDEFPLLTTKRVFWKGVLEELLWFIKGSTNAKELSSKGVKIWDANGSRDFLDSLGFSTREEGDLGPVYGFQWRHFGAEYRDMESDYSGQGVDQLQRVIDTIKTNPDDRRIIMCAWNPRDLPLMALPPCHALCQFYVVNSELSCQLYQRSGDMGLGVPFNIASYALLTYMIAHITGLKPGDFIHTLGDAHIYLNHIEPLKIQLQREPRPFPKLRILRKVEKIDDFKAEDFQIEGYNPHPTIKMEMAV

SEQ ID NO: 355 - DNA, 2054 bp, Homo sapiens
  CDS (366)..(1262)
cccgacccagcgttttccttgggattccgacctccccctcagagaagacaggaggtcgggaaggacctgcagcccaggggcttccaagatgaggcccagagactcggattatcaatgcagagaaatctgaattcaatgaggatcaagccgcctgtgggaagctgtgcatccggagatgtgagtttggggctgaagaagagtggctgaccctgtgcccagaggagttcctgacaggccattactgggcactgttcgatgggcacggcggtcctgcagcagccatcttggctgccaacaccctgcactcctgcttgcgccggcagctggaggccgtggtggaaggcttggtggccactcagccccccatgcacctcaatggccgctgcatctgccccagtgaccctcagtttgtggaggaaaagggcatcagggcagaagacttggtgatcggggcattggagagtgcctttcaggaatgtgatgaggtgatcgggcgggagctggaggcctcaggccagatgggcggctgcacagccctggtggctgtgtccctgcagggaaagctgtacatggccaatgctggggatagcagggccatcttggtgcggagagatgagatacggccactgagcttcgagttcaccccagagactgagcggcagcggatccagcagctggcctttgtctatcctgagcttctggctggtgagttcacccgactggagttccctcggcggctgaagggggatgacttgggacagaaggttttgttcagggatcaccacatgagtggctggagctacaaacgtgtggagaaatcggatctcaagtacccactgatccatggacagggtaggcaggctcggttactaggaacactggctgtctcccggggcctgggagaccatcagctcagagtcctggacacaaacatccagctcaagcccttcttgctctctgtgccacaggtgactgtgctggatgtggaccagctggagctacaggaggatgatgtggttgtcatggcaactgatggactctgggatgtactgtccaacgagcaggtggcatggctggtgcggagcttcctccctgggaaccaagaggacccacacaggttctcaaagctggcccagatgctgatacacagcacacagggaaaggaagacagtctcacagaggaagggcaggtgtcctacgatgacgtctctgtgttcgtgattcccttgcacagtcagggccaagagagcagtgaccactgaggattcagacactgtatcccagaactgctctagtgcccgggtgtggtctgggcatccctccagtgtgaccaagagcaaatcctgcctgccctatccctagccaccgcccagtgctctcactatccacctcaacacacatccatctcaagaggaacatttataccaggcagtcagagctggaagtgtatggagagcccagcccaccaggtcctgccttttgcggtgataaccttctctggcagagtgactttacaacttaactaggaaacccatgtgaggctcctcagacaggatcttgaacagcccaaagtatcattctcagataggggcacccaagctaagggtattagccaaagatgccaggatgggtagctagcccatgtttagatccaggtctccaattcatggttatcagggcatgtgttcaacaacccccaaagtccacgcaggtggcttgtagaaacctttgggcagcctcatgtctgctaaaacagccatcttcaagacagcccctgaaaagagaccagttcaggtcctgccctgctgttctttgctggagatgaggaacaggtgctggggctaaagtttggggtagagcacaagggacaagaggaactcttggagttggctgggtgagagggctctccatttgctacctgtagtagcctgcctcttaactggttgcttctccctagttccagccctgccctggtctgatgccccaacactgcccttgctttgttttccctgtcacctccctattattaaatgttttctacagaagaaaaaaaa

SEQ ID NO: 356 - protein, 298 aa, Homo sapiens
MHLNGRCICPSDPQFVEEKGIRAEDLVIGALESAFQECDEVIGRELEASGQMGGCTALVAVSLQGKLYMANAGDSRAILVRRDEIRPLSFEFTPETERQRIQQLAFVYPELLAGEFTRLEFPRRLKGDDLGQKVLFRDHHMSGWSYKRVEKSDLKYPLIHGQGRQARLLGTLAVSRGLGDHQLRVLDTNIQLKPFLLSVPQVTVLDVDQLELQEDDVVVMATDGLWDVLSNEQVAWLVRSFLPGNQEDPHRFSKLAQMLIHSTQGKEDSLTEEGQVSYDDVSVFVIPLHSQGQESSDH

SEQ ID NO: 357 - DNA, 3659 bp, Homo sapiens
  CDS (346)..(2148)
ggaacagtgtggggcctggaccgctgggtaggcgcgtccagcggcctgagcaggggagggtaatgaggctgttacgcgccttctccgcatcttggcgggagcctgacgccccgcttcttccctaacggggtgttccaccggcgcctgccgaggcctaggcctccgcagccgccctccgtctcctcagccccgacgctgcgcccgctttgtgcgcatttttctctggggaaactgaggctccgagtgcgaaagtcagccgaggtcgccccgcccaggacagagaagggctgggggtcggctgagccgcggcattcccgggccccgctagggctgcagggtctcaggatggcagcctcggcgcaggtgtctgtgacctttgaggatgtggctgtgacattcacccaggaggagtggggacagttggatgcagcccagagaaccttgtatcaggaggtgatgctggagacctgcggacttctcatgtctctgggctgtcctttgttcaaaccagagctgatctaccagttggatcacagacaggagctatggatggctacaaaagacctctcccaaagctcctatccaggtgacaacacaaaacccaagaccacagagcctaccttttctcacctggccttgcctgaggaagtcttactccaggaacaactgacacaaggagcctcaaagaactcccaattagggcaatccaaggatcaggatgggccatctgaaatgcaagaagtccacttgaaaatagggataggcccccagcgggggaagctgctggagaaaatgagttctgaacgtgatggtttggggtcagatgatggtgtatgtacaaagattacacagaaacaagtttcaacagaaggtgatctctatgaatgtgattcacatggaccagttacagatgccttgattcgcgaagagaaaaattcctataaatgtgaggaatgcgggaaagtgtttaaaaagaatgccctccttgttcagcatgaacggattcacactcaagtgaagccctatgaatgcacagagtgtgggaaaacctttagcaagagcactcatcttcttcagcacctcatcatccacactggggagaagccctataagtgcatggagtgtgggaaggcttttaaccgcaggtcacacctcacacggcaccagcggattcacagtggagagaagccttataagtgcagtgaatgtggaaaggccttcacccaccgctccacttttgtcttgcatcacaggagccacactggagaaaaaccctttgtgtgcaaagagtgtggcaaagcctttcgagataggccaggtttcattcgacactacatcatccacacgggagagaagccctatgagtgcattgagtgtgggaaggccttcaaccgccggtcatacctcacgtggcaccaacagattcacactggagtgaaaccctttgaatgcaacgagtgtggaaaagctttttgcgagagtgcagacctcattcaacactacattatccacactggggagaagccctataagtgcatggagtgtgggaaggcgttcaaccgtaggtcacacctcaagcagcatcaacggattcacactggggagaagccttatgaatgcagtgaatgtggaaaggccttcacccactgctccacttttgtcttgcataaaaggacccacacaggagaaaaaccctatgaatgcaaagaatgtggaaaagcctttagtgatagggcagacctcattcgccacttcagcatccacactggagagaaaccctatgagtgcgtggagtgtggaaaggccttcaaccgcagctcacacctcacgaggcaccaacagattcacactggagagaaaccctatgaatgcatccagtgtgggaaagccttttgccggagcgcaaaccttattcgacactccatcattcacactggagagaagccgtatgaatgcagtgagtgtggaaaggcttttaatcgcggctcatccctcacacatcatcaaaggattcatactgggagaaaccctaccattgtaacagatgtgggaagaccttttatgactgcacagacttcagtcaacatccaggaacttttattagggaaagagtttttgaatatcaccactgaagaaaatctgtggtgaaagggaacatcttaccatctggccattcacactgaagagaaacttcataagcatcctctctttgagaaaacgtgtaatagatgatcatttgtcgtctaaacaatcaagttagaaattgaaccagcctggagtcttattctccacctgagaattcacccatgagagagacccagtggttgctatgcacttaggaaaactttcagccacatctttcttcttagtttacagtgaaatattatctcagggatattttttttttttttttgagacggagtctcgctctgtcgcccaggctggagtgcagtggcgggatctcggctcactgcaagctccgcctcccgggttcacgccattctcctgcctcagcctcccaagtagctgggactacaggcacccgccactacgcctggctaattttttgtatttttagtagagacggggtttcaccgttttagccgggatggtctcgatctcctgacctcgtgatccgcccgcctcagcctcccaaagtgctgggattacaggcgtgagccaccgcgcccggccatctcagggatatttaaacaaaggaagaggaaatatagggaagagaaagaaaccacagcttcttttagacttgtctgacaagcctatggcaattttgtcgtccctttgttattttatgtgggagagggaaatgtttcagaaacgaaagatctcatcccctttatttttctgtgtatgcattcactgctgcccagtgtcagaacagttatacaaacgagggcttgaaaacattttgtgaaaacttgcttagtcctgcaacgttctccactctcgaggtgcagaagcatacatctttataaaaaatatggaggcttgagttatgaaacacttttataaggagataaggatgtacatatgtttggacacattgtccacttcagatgcttgtttaaaaaaatgtttcaccatgtgtctttacccaatacacatactttttcttgatgtggatttactttttttttttttttttaagttttcctgggatagggatgatagtgtaattgttcatgcccacagtaatcctgggaatcttagttttttcctatgattgtggtttctcagcttctttacctctcctttgagttaggtccacctcagttttctaaaggtcaaattaaggcccccccaaaaatacagtatgtagctgaattcctttgaaagatcatgataaactcagaagaacaaacatagaaggaatgtcatttttaatctttttaaagagtgtgtgaaaattcactttaactggaattttaacaggcaagccggcatgcatatatgtagggatgtgtgactttcacagttgtcaccatggacttaggcttgattaaaatgctacacatttagagcgttttgtaattccttttttatatttttaagactagattttgagccatgtgatagttttacctcatattaaatatattgtacagaagtaaaaataatcatgtattcactttgaactcctc

SEQ ID NO: 358 - protein, 600 aa, Homo sapiens
MAASAQVSVTFEDVAVTFTQEEWGQLDAAQRTLYQEVMLETCGLLMSLGCPLFKPELIYQLDHRQELWMATKDLSQSSYPGDNTKPKTTEPTFSHLALPEEVLLQEQLTQGASKNSQLGQSKDQDGPSEMQEVHLKIGIGPQRGKLLEKMSSERDGLGSDDGVCTKITQKQVSTEGDLYECDSHGPVTDALIREEKNSYKCEECGKVFKKNALLVQHERIHTQVKPYECTECGKTFSKSTHLLQHLIIHTGEKPYKCMECGKAFNRRSHLTRHQRIHSGEKPYKCSECGKAFTHRSTFVLHHRSHTGEKPFVCKECGKAFRDRPGFIRHYIIHTGEKPYECIECGKAFNRRSYLTWHQQIHTGVKPFECNECGKAFCESADLIQHYIIHTGEKPYKCMECGKAFNRRSHLKQHQRIHTGEKPYECSECGKAFTHCSTFVLHKRTHTGEKPYECKECGKAFSDRADLIRHFSIHTGEKPYECVECGKAFNRSSHLTRHQQIHTGEKPYECIQCGKAFCRSANLIRHSIIHTGEKPYECSECGKAFNRGSSLTHHQRIHTGRNPTIVTDVGRPFMTAQTSVNIQELLLGKEFLNITTEENLW

SEQ ID NO: 359 - DNA, 2171 bp, Homo sapiens
  CDS (264)..(1667)
gagctcggcgcacctgggctgggcaggtaagggctggtgcgggacggggagaggaacctgcagtccctacttgggtagagccaggcgccccttggctaagacgtcgaggagcgtggtagcgacgggtgatcttcgctgcggacttggttcggagggacgtccgcttctggtggacagattgagcaaagaatctttgagcggtcaagggaaagacaagccgactcttcagatccctgtggacacactgcctgctcttccatatcatggccctccacccccgcagagtccggctaaagccctggctggtggcccaggtggatagtggcctctaccctgggctcatctggctacacagggactctaaacgcttccagattccctggaaacatgccacccggcatagccctcaacaagaagaggaaaataccatttttaaggcctgggctgtagagacagggaagtaccaggaaggggtggatgaccctgacccagctaaatggaaggcccagctgcgctgtgctctcaataagagcagagaattcaacctgatgtatgatggcaccaaggaggtgcccatgaacccagtgaagatatatcaagtgtgtgacatccctcagccccagggctcgatcattaacccaggatccacagggtctgctccctgggatgagaaggataatgatgtggatgaagaagatgaggaagatgagctggatcagtcgcagcaccatgttcccatccaggacaccttccccttcctgaacatcaatggttctcccatggcgccagccagtgtgggcaattgcagtgtgggcaactgcagcccggaggcagtgtggcccaaaactgaacccctggagatggaagtaccccaggcacctatacagcccttctatagctctccagaactgtggatcagctctctcccaatgactgacctggacatcaagtttcagtaccgtgggaaggagtacgggcagaccatgaccgtgagcaaccctcagggctgccgactcttctatggggacctgggtcccatgcctgaccaggaggagctctttggtcccgtcagcctggagcaggtcaaattcccaggtcctgagcatattaccaatgagaagcagaagctgttcactagcaagctgctggacgtcatggacagaggactgatcctggaggtcagcggtcatgccatttatgccatcaggctgtgccagtgcaaggtgtactggtctgggccatgtgccccatcacttgttgctcccaacctgattgagagacaaaagaaggtcaagctattttgtctggaaacattccttagcgatctcattgcccaccagaaaggacagatagagaagcagccaccgtttgagatctacttatgctttggggaagaatggccagatgggaaaccattggaaaggaaactcatcttggttcaggtcattccagtagtggctcggatgatctacgagatgttttctggtgatttcacacgatcctttgatagtggcagtgtccgcctgcagatctcaaccccagacatcaaggataacatcgttgctcagctgaagcagctgtaccgcatccttcaaacccaggagagctggcagcccatgcagcccacccccagcatgcaactgccccctgccctgcctccccagtaattgtgaatgccatcttcttccttctcttttttataatattgtacatatggatttttttattgtttagatttaaccagcttttaaatctctcttttctctaacagtgttagaagtttgtgattctccaaatatgcctagatttaaagctgatttaatttatggaaaaatcacccttcagactttgcttttctttttcaaatctcctaatggtagtatgatatagcatagtagaaggagatttggcctgggagtttggacaccaaagttctagctgcagctttgcttccaatgtgaccttgaacaagtcctttaacctctgggcttcagatttattgcttataaagtgaagagattggagtagtgcctgaaattgcatccagctttagaacggactcaatgaccttcttctacttgtacaaggctaaactgcctggaacagaatccttctgcattgttcttgtaccacatttttccttggttttgttaaagtttcctcaagcacta

SEQ ID NO: 360 - protein, 467 aa, Homo sapiens
MALHPRRVRLKPWLVAQVDSGLYPGLIWLHRDSKRFQIPWKHATRHSPQQEEENTIFKAWAVETGKYQEGVDDPDPAKWKAQLRCALNKSREFNLMYDGTKEVPMNPVKIYQVCDIPQPQGSIINPGSTGSAPWDEKDNDVDEEDEEDELDQSQHHVPIQDTFPFLNINGSPMAPASVGNCSVGNCSPEAVWPKTEPLEMEVPQAPIQPFYSSPELWISSLPMTDLDIKFQYRGKEYGQTMTVSNPQGCRLFYGDLGPMPDQEELFGPVSLEQVKFPGPEHITNEKQKLFTSKLLDVMDRGLILEVSGHAIYAIRLCQCKVYWSGPCAPSLVAPNLIERQKKVKLFCLETFLSDLIAHQKGQIEKQPPFEIYLCFGEEWPDGKPLERKLILVQVIPVVARMIYEMFSGDFTRSFDSGSVRLQISTPDIKDNIVAQLKQLYRILQTQESWQPMQPTPSMQLPPALPPQ

SEQ ID NO: 361 - DNA, 2258 bp, Homo sapiens
  CDS (393)..(956)
cctgcctgggtgggtgtcctgtgacttgacagtggctcccccagccccaaagccagcccccttcttctgtgacttagtctgttgtagtggtgagctgacacatccaggtgtgaccgttgctgaaaacttgtgccccctctgtggtatgcccctgccctgttctataaatagctataaattatcatatatatacacatacacaaactcacacacacacacacatatatatatatacacatatacatgtggtcgactgcctcgcctctagcactgggaatcagtccccgtgctgtgcttgtggagtcttgtagcccagcaagaggaagctgtctcctgacatcgcccctccaaagtgcaccacctccagtgagcttccgggacatgcgcggcctatggacagccagcccccgccatccctcccgcccttctggccaagcatggcggtgctgtgcaggcagctgtgtggcctgacagtctctaccagtcctgctgtccctcggctgagaaacccatttctgaatgacagagaatgtgtcctctgctggctgtgttctctatggagctcaggggagggaagaggccaagccatttttagggtgctgttggcagcagtgaaaaggtcacacccttttcaagggacacttttcctggaaagtccctggagcttagctggctcttattctgtgaagccggctctggccagtagggcacagggccctgaactcagcctggaaggagcctgtggggcagccggcactctggagggacagacaggccacccggtgcagacaggagagggaggcagggggacggaatggaagacacgtggggtggatggaagtcagtgcccttgggcactggtatctgtcttcctgaccacagctagatcaggcttctcaacctgttggctctcagggccggactatactccagaggcgccatggcagtcctcgtgaaatccaccaggtatcaccaggcagcatacaggtaacaggcctggaagattccccacagcccagctggacatgctgagacactctggggctcctcattgagtgggaaaaactgcaggacccagtgagggaaacacgaacatgccaggccgagcagtatggctaaatccatttattccaaaatcaaaagcgaaccaaaacaaaaacaaaaaaacaaaacaaaacaaaaaaggggtcccatcaccagggagccatgacgccatccccacccccatcatcgctcctatgctaacaatgaataagtttcccagccgcgaataattataagaacctcttcctcatatgccagctgcaacctccgctaggtacaatacagaatgttacacagctacagtatgtacacgggggaaggggggccacccccagcagcctgtgccctggcctggtctacagttaactccactgtcccgcctcagctgcctctctgagtaagaagatgggagcccccctgagggaaaagttgctttggtgagagtaagaaggccgtcagacctcctccaaacaaaccaactccaccaacctctggctcttaaataacaaacatcatcatccagaaatgtaaggactcagccttggtcaaggtggtaaagggtctgtttgtctccctccattagacaggggtcttgtcttgctaccctaatggtaaagggctgactggggaggggttgtagggacatggtgggggtgaagactccagacccacttctccaggcttatgctgacaggggcctgcttttatttatttttatttttatcccatgactttttttaaatcctgtaactaatttttcataactttttaaaataacttttcataaaactttttttttactttttttccacaacttttttttgccacttttccacagtatttttttatcctgtaactttttcatcccacaactttaattcctgttaacttttttagtttgtgttcttttaataaacacacttacatagttacaattttgtaagaataaaaaccgattacctcatgccaagcatgccgagaatttgcagagtctcaatacccaatactatagttttcaagacacacaaaatttttaggcaaaacagcaccttgaaacaatttaataatgtattacattacagtagcatcacagcagcagtcaataatgccactttagacaaaaatcagtatttccattatgcattctgtgtataagaattcataaatcggtaaaagtcattctaagaaaacttggcaaatacagctttggactg

SEQ ID NO: 362 - protein, 187 aa, Homo sapiens [sequence omitted]

SEQ ID NO: 363 - DNA, 2300 bp, Homo sapiens
  CDS (272)..(1840)
attgtgttctgactgcgatgtggcgcttgcgatctctcgccgccggcagaggctcctcgaagagcgacacggggctgaccaggcacggtggtcaaagccgcagagggagagcgggagcggtcgtgaggtcgtctggggagaagggcggaggcaaagccgaggagcaggtgtgtggacccttctagcctgaggagtcctgcaggtgtgaagctccacacctgcctccatagcactttgcctgtccctaagagggctcatcggagaagaaagaatggctgtcagccacctgccaaccatggtccaggaatcggtgaccttcaaggatgtggctatactgttcacccaggaggagtgggggcagctgagccccgcccagagggccctgtacagggacgtgatgctggagaactacagcaacctggtctcactgggactcttaggacccaaaccagatacgttttcccagctagaaaaaagggaagtgtggatgccagaggacacccctggaggcttctgtcttgactggatgactatgcctgccagtaagaaatctactgtcaaggcagagattcctgaagaagaattggatcaatggacaataaaggaaagattcagtagcagtagtcactggaagtgtgctagcctgctggagtggcaatgtggaggccaggagatcagtttgcagcgagtggtactcactcaccccaacaccccatcacaggaatatgatgaatccgggagcactatgagctcatctcttcacagtgatcaaagtcagggatttcaacctagcaaaaatgcctttgagtgtagtgagtgtggaaaagtcttctctaagagttcaactcttaataaacatcagaaaattcataatgaaaaaaatgcaaatcagaaaattcatattaaggagaaaagatatgaatgtagagaatgtgggaaagcctttcaccagagtacgcaccttatccatcaccaaagaattcacactggcgagaaaccctatgaatgtaaggaatgtggcaaggccttctcagtgagctcctcacttacgtaccatcagaaaattcatactggagagaagccttttgaatgcaacttatgtggaaaagcttttatccgaaatatacaccttgcccatcatcatagaatacatactggagagaaaccttttaaatgtaacatttgtgaaaaagcctttgtgtgcagggcacaccttaccaaacaccagaatatccacagtggagagaaaccctataaatgcaatgaatgtggaaaagcctttaatcagagtacaagtttccttcagcatcagagaattcacactggagagaaaccctttgaatgtaatgaatgtgggaaggccttcagggtgaactcttcccttactgaacatcagagaattcatactggagagaaaccttataaatgtaatgaatgtgggaaagctttcagggataattcatcctttgcacgacatcggaaaattcacactggagagaaaccttacagatgtggcttgtgtgagaaagcctttcgggaccaatcagcactagcccaacatcagagaattcatactggggaaaaaccttatacatgtaacatatgtgaaaaagccttcagtgaccattcagcccttacccaacataagagaattcatactagggaaaaaccttacaaatgtaaaatctgtgagaaagcctttatccgaagcactcacctgactcaacatcagaggattcacacaggagagaaaccctataaatgtaataaatgtgggaaagcttttaaccagactgcaaacctcattcagcatcagagacatcatattggagagaagtgatatgaatgcagtttgtatggaagacctttgagactgagtagatgaattattgaatgtgagataatccgttctagagaataactatgaaagcttgcatcaagatagtcactttatttactgagggtcaggtttcacagtgtcatggggtttgggcatttaagaatggcaaacactcggctgggcacggtggctcacgtctgtaatctttgggagcactttgggaggccgaggtgggcggatcgcgaggtcaggggatcgggaccatcctggctaacagggtgaagccccatcgctactagaaatgtagaaaattacccgggcatggtggtgggcgcctgtggtcccggctgctcgggaggctgaggcaggagaatggcatgaacccgggaggcggaggttgcagtgagccgagatcgtgccactgcgctccagcctgggcgacagagcaagactcagtctc

SEQ ID NO: 364 - protein, 522 aa, Homo sapiens
MAVSHLPTMVQESVTFKDVAILFTQEEWGQLSPAQRALYRDVMLENYSNLVSLGLLGPKPDTFSQLEKREVWMPEDTPGGFCLDWMTMPASKKSTVKAEIPEEELDQWTIKERFSSSSHWKCASLLEWQCGGQEISLQRVVLTHPNTPSQEYDESGSTMSSSLHSDQSQGFQPSKNAFECSECGKVFSKSSTLNKHQKIHNEKNANQKIHIKEKRYECRECGKAFHQSTHLIHHQRIHTGEKPYECKECGKAFSVSSSLTYHQKIHTGEKPFECNLCGKAFIRNIHLAHHHRIHTGEKPFKCNICEKAFVCRAHLTKHQNIHSGEKPYKCNECGKAFNQSTSFLQHQRIHTGEKPFECNECGKAFRVNSSLTEHQRIHTGEKPYKCNECGKAFRDNSSFARHRKIHTGEKPYRCGLCEKAFRDQSALAQHQRIHTGEKPYTCNICEKAFSDHSALTQHKRIHTREKPYKCKICEKAFIRSTHLTQHQRIHTGEKPYKCNKCGKAFNQTANLIQHQRHHIGEK

SEQ ID NO: 365 - DNA, 1849 bp, Homo sapiens
  CDS (62)..(1063)
gcacagtatctgggtccagcctgcagccctagggtccagttcagagtctgtcatctgaaccatgaggatctggtggcttctgcttgccattgaaatctgcacagggaacataaactcacaggacacctgcaggcaagggcaccctggaatccctgggaaccccggtcacaatggtctgcctggaagagatggacgagacggagcgaagggtgacaaaggcgatgcaggagaaccaggacgtcctggcagcccggggaaggatgggacgagtggagagaagggagaacgaggagcagatggaaaagttgaagcaaaaggcatcaaaggtgatcaaggctcaagaggatccccaggaaaacatggccccaaggggcttgcagggcccatgggagagaagggcctccgaggagagactgggcctcaggggcagaaggggaataagggtgacgtgggtcccactggtcctgaggggccaaggggcaacattgggcctttgggcccaactggtttaccgggccccatgggccctattggaaagcctggtcccaaaggagaagctggacccacggggccccagggtgagccaggagtccggggaataagaggctggaaaggagatcgaggagagaaagggaaaatcggtgagactctagtcttgccaaaaagtgctttcactgtggggctcacggtgctgagcaagtttccttcttcagatatgcccattaaatttgataagatcctgtataacgaattcaaccattatgatacagcagcggggaaattcacgtgccacattgctggggtctattacttcacctaccacatcactgttttctccaggaatgttcaggtgtctttggtcaaaaatggagtaaaaatactgcacaccaaagatgcttacatgagctctgaggaccaggcctctggcggcattgtcctgcagctgaagctcggggatgaggtgtggctgcaggtgacaggaggagagaggttcaatggcttgtttgctgatgaggacgatgacacaactttcacagggttccttctgttcagcagcccgtgacagaggagagtttaaaaatccgccacaccatccatcagaatcagcttgggatgaacttattcagatggttttactttattaattcctccaattattacaataatcataaaaaggtgaaaatggaaaagttattcccaaaactgattctgtgtaacttactatttttccaggagtaaatatttaaaatagctgcatggtttattctaatttatttcacatttcttattcctattatctgaagaatccctcgtctgtgcgtttcttgtgggaagagtgttttaatatcattttagtgctctgaggagtcatatgaagatgtatccctcatctgtgtttctgaggacattaaggggaaattagagggaaatgtttattcaatttagtactagcaacagctttaagctggtgatgctgtcatactccagaaagctgtagacactgctcattttgtcttttaaaaaaattttattttattttaagttctgggatacatatgcaaaacatgcatgtttgttacataggtaaacatgtgctgtggtggtttgctgtatctatcaacccatcacctaggtattaagccctgcatgcattagctatttgtcctggtgctctccctcccactttgctcattttctaacctaggttttaatcaccattttacccaacaaatcattgttcgatcattatttgccagacttgaatctctatgtgttttctaggactgctctaataaagtacacaaactgggagtctttaaacaacaaaaaaaaaaaaaaaaaaaaaaaa

SEQ ID NO: 366 - protein, 333 aa, Homo sapiens
MRIWWLLLAIEICTGNINSQDTCRQGHPGIPGNPGHNGLPGRDGRDGAKGDKGDAGEPGRPGSPGKDGTSGEKGERGADGKVEAKGIKGDQGSRGSPGKHGPKGLAGPMGEKGLRGETGPQGQKGNKGDVGPTGPEGPRGNIGPLGPTGLPGPMGPIGKPGPKGEAGPTGPQGEPGVRGIRGWKGDRGEKGKIGETLVLPKSAFTVGLTVLSKFPSSDMPIKFDKILYNEFNHYDTAAGKFTCHIAGVYYFTYHITVFSRNVQVSLVKNGVKILHTKDAYMSSEDQASGGIVLQLKLGDEVWLQVTGGERFNGLFADEDDDTTFTGFLLFSSP

SEQ ID NO: 367 - DNA, 5503 bp, Homo sapiens
  CDS (899)..(3697)
ttcatctgtacctttcaagtattcaaatagaaaaatataaacaatgtaaataaaatagcaaaacaatgtaatatctcataaaactgcaatggtaaaagcatttatcctattgaaattccacaatttttatttgaaaatattatcgacatgtaattcaagtggcatttagaagaataatttaaaagcaacaactctatagaaagcttgtaaaatgattaagtagtttaaaccaaataaaacaatttctgagtcagtcatctccagtaggtctattttagtctcaagataaattcatttctggtgacaactgaagttcttagttatttgttagtatatattggagacatttacaataaagcttagagcacaatgggaaatgaaagtatcatgttttttttaagaccaaatgtattgcagaaatgtgagtaatttaatccgatgctacaatctgatcattctgatctaatctgatcatttaataacactaaataaaaccttcatctcacattctttggctgtttcttttaaaatatgggtttacggataaatcaaataaattcaaaacaaagtaataagcaaatgatttttttttctcagtaatctagtagagtattacatttagaagtaatctgtatctcagtgcagtaactatttaggactgtaagcgccgctgttcacctactggaagacaaatgcaaccgaaaacactcagatctcacacctcacgaagacccgcagatgccacaaactaactgctggactgcagcgaaacccgacccctgtttggaggcactccaggtttccggaggattgtcatctccatagctgcggcaagaaactaaataagacccatttatgcacagtgaagattctgagaggattctgcagcaaaacaacaatggccgctccacagagtcgccccagacgcggcgagctgatcctgctgtgcgcgctgctgggaacgctgtgggaaatcgggaggggacagattcgctactctgtgccagaagagacggacaaaggctccttcgtgggtaatatctccaaggacctggggctggacccccggaagctggcgaagcacggagtccgtatcgtctccagaggtaggacgcagctctttgctctgaacccgcgcagcggcagcttgatcaccgcgggcaggatagatcgggaggagctctgcgctcagagcccgcggtgtctgataaatattaacaccctggttgaggataaaggaaaactctttggggtagaaatagaaataattgatattaacgataataacccaaaattccaggtcgaagatctagaagtaaaaattaacgaaatcgcggttcctggagcacgttatccactcccagaagctgttgacccggatgtgggcgtgaactccctccagagctaccagctcagccccaatcaccacttctccctggacgtgcagactggagacaatggagccataaacccagagctggtgctggagcgcgccctggacagggaggaagaggctgctcaccacctggtcctcacggcctcggatggcggcaagccgcctcgctctagcacagtgcgcatccacgtgacagtgttggatacaaatgacaatgccccggtttttcctcacccgatttaccgagtgaaagtccttgagaacatgcccccaggcacgcggctgcttactgtaacagccagcgacccggatgagggaatcaacggaaaagtggcatacaaattccggaaaattaatgaaaaacaaactccgttattccagcttaatgaaaatactggggaaatatcaatagcaaaaagtctagattatgaagaatgttcattttatgaaatggaaatacaagccgaagatgtgggggcacttctggggaggaccaaattgctcatttcggtggaagatgtaaatgacaatagaccagaagtgatcattacgtctttgtttagcccagtgttagaaaattctcttcccgggacagtaattgccttcttgagtgtgcatgaccaagactctggaaagaatggtcaagttgtctgttacacacgtgataatttaccttttaaattagaaaagtcaataggtaattattatagattagtgacaaggaaatatttggaccgagaaaatgtctctatctacaatatcacagtgatggcctcagatctaggaacaccacctctgtccactgaaactcaaatcgctctgcacgtggcagacattaacgacaaccctcctactttccctcatgcctcctactcagcgtatatcctagagaacaacctgagaggagcctccatcttttccttgactgcacacgaccccgacagccaggagaatgcccaggtcacttactctgtgaccgaggacacgctgcagggggcgcccctgtcctcgtatatctccatcaactctgacaccggtgtcctgtatgcgctgcaatctttcgactatgagcagatccgagacctgcagctactggtaacagccagcgacagcggggacccgcccctcagcagcaacatgtcactgagcctgttcgtgctggaccagaatgacaacgcgcccgagatcctgtaccccgccctccccacagacggttccactggcgtggagctggcgccccgctccgcagagcgtggctacctggtgaccaaggtggtggcggtggacagagactcgggccagaacgcctggctgtcctaccgcctgctcaaggccagcgagccgggactcttctcggtgggtctgcacacgggcgaggtgcgcacggcgcgagccctgctggacagagatgcgctcaagcagagcctcgtggtggccgtccaggaccatggccagccccctctctccgccactgtcacgctcaccgtagccgtggctgacagcatccccgaagtcctgaccgagttgggcagtctgaagccttcggtcgacccgaacgattcgagccttacactctatctcgtggtggcagtggctgccatctcctgtgtcttcctcgcctttgtcgctgtgcttctggggctcaggctgaggcgctggcacaagtcacgcctgctccaggattccggtggcagattggtaggcgtgcctgcctcacattttgtgggtgttgaggaggtacaggctttcctgcagacctattcccaggaagtctccctcaccgccgactcgcggaagagtcacctgatctttccccagcccaactacgcagacatgctcatcagtcaggagggctgtgagaaaaatgattctttgttaacatccgtagattttcatgaatataagaatgaagctgatcatggtcagcaagccccgcccaacacggactggcgtttctctcaggcccagagacccggcaccagcggctcccaaaatggcgatgacaccggcacctggcccaacaaccagtttgacacagagatgctgcaagccatgatcttggcgtccgccagtgaagctgctgatgggagctccaccctgggagggggtgccggcaccatgggattgagcgcccgctacggaccccagttcaccctgcagcacgtgcccgactaccgccagaatgtctacatcccaggcagcaatgccacactgaccaacgcagctggcaagcgggatggcaaggccccagcaggtggcaatggcaacaagaagaagtcgggcaagaaggagaagaagtaacatggaggccaggccaagagccacagggcggcctctccccaaccagcccagcttctccttacctgcacccaggcctcagagtttcagggctaacccccagaatactggtaggggccaaggccatgctccccttgggaaacagaaacaagtgcccagtcagcacctaccccttcccccccagggggttgaatatgcaaaagcagttccgctgggaacccccatccaatcaactgctgtacccatgggggtagtggggttactgtagacaccaagaaccatttgccacaccccgtttagttacagctgaactcctccatcttccaaatcaatcaggcccatccatcccatgcctccctcctccccaccccactccaacagttcctctttcccgagtaaggtggttggggtgttgaagtaccaagtaacctacaagcctcctagttctgaaaagttggaagggcatcatgacctcttggcctctcctttgattctcaatcttcccccaaagcatggtttggtgccagccccttcacctccttccagagcccaagatcaatgctcaagttttggaggacatgatcaccatccccatggtactgatgcttgctggatttagggagggcattttgctaccaagcctcttcccaacgccctggggaccagtcttctgttttgtttttcattgtttgacgtttccactgcatgccttgacttcccccacctcctcctcaaacaagagactccactgcatgttccaagacagtatggggtggtaagataaggaagggaagtgtgtggatgtggatggtgggggcatggacaaagcttgacacatcaagttatcaaggccttggaggaggctctgtatgtcctcaggggactgacaacatcctccagattccagccataaaccaataactaggctggacccttcccactacataatagggctcagcccaggcagccagctttgggctgagctaacaggaccaatggattaaactggcatttcagtccaaggaagctcgaagcaggtttaggaccaggtccccttgagaggtcagaggggcctctgtgggtgctgggtactccagaggtgccactggtggaagggtcagcggagccccagcaggaagggtgggccagccaggccattcttagtccctgggttggggaggcagggagctagggcagggaccaaatgaacagaaagtctcagcccaggatggggcttcttcaacagggcccctgccctcctgaagcctcagtccttcaccttgccaggtgccgtttctcttccgtgaaggccactgcccaggtccccagtgcgccccctagtggccatagcctggttaaagttccccagtgcctccttgtgcatagaccttcttctcccacccccttctgcccctgggtccccggccatccagcggggctgccagagaaccccagacctgcccttacagtagtgtagcgccccctccctctttcggctggtgtagaatagccagtagtgtagtgcggtgtgcttttacgtgatggcgggtgggcagcgggcggcgggctccgcgcagccgtctgtccttgatctgcccgcggcggcccgtgttgtgttttgtgctgtgtccacgcgctaaggcgaccccctcccccgtactgacttctcctataagcgcttctcttcgcatagtcacgtagctcccaccccaccctcttcctgtgtctcacgcaagttttatactctaatatttatatggctttttttcttcgacaaaaaaataataaaacgtttcttctgaaaagctg

SEQ ID NO: 368 - protein, 932 aa, Homo sapiens
MAAPQSRPRRGELILLCALLGTLWEIGRGQIRYSVPEETDKGSFVGNISKDLGLDPRKLAKHGVRIVSRGRTQLFALNPRSGSLITAGRIDREELCAQSPRCLININTLVEDKGKLFGVEIEIIDINDNNPKFQVEDLEVKINEIAVPGARYPLPEAVDPDVGVNSLQSYQLSPNHHFSLDVQTGDNGAINPELVLERALDREEEAAHHLVLTASDGGKPPRSSTVRIHVTVLDTNDNAPVFPHPIYRVKVLENMPPGTRLLTVTASDPDEGINGKVAYKFRKINEKQTPLFQLNENTGEISIAKSLDYEECSFYEMEIQAEDVGALLGRTKLLISVEDVNDNRPEVIITSLFSPVLENSLPGTVIAFLSVHDQDSGKNGQVVCYTRDNLPFKLEKSIGNYYRLVTRKYLDRENVSIYNITVMASDLGTPPLSTETQIALHVADINDNPPTFPHASYSAYILENNLRGASIFSLTAHDPDSQENAQVTYSVTEDTLQGAPLSSYISINSDTGVLYALQSFDYEQIRDLQLLVTASDSGDPPLSSNMSLSLFVLDQNDNAPEILYPALPTDGSTGVELAPRSAERGYLVTKVVAVDRDSGQNAWLSYRLLKASEPGLFSVGLHTGEVRTARALLDRDALKQSLVVAVQDHGQPPLSATVTLTVAVADSIPEVLTELGSLKPSVDPNDSSLTLYLVVAVAAISCVFLAFVAVLLGLRLRRWHKSRLLQDSGGRLVGVPASHFVGVEEVQAFLQTYSQEVSLTADSRKSHLIFPQPNYADMLISQEGCEKNDSLLTSVDFHEYKNEADHGQQAPPNTDWRFSQAQRPGTSGSQNGDDTGTWPNNQFDTEMLQAMILASASEAADGSSTLGGGAGTMGLSARYGPQFTLQHVPDYRQNVYIPGSNATLTNAAGKRDGKAPAGGNGNKKKSGKKEKK

SEQ ID NO: 369 - DNA, 2245 bp, Homo sapiens
  CDS (280)..(1995)
gggacgcgggcggcggcggaggctgcgggagtcgctgccgctcgagggaccgcggacccgggaggtccggctcccggcgccgggcctcagtttcccccacgggagccgcatcccacccccagagccccagcgcgtccgcggggtccgagtcgcggccggcgcggggcggggaggggcgggaagtttgcgccctacacgcggcctcgcagacttggcggctccgctcccggccgggagcaggtggccatggtgcccggccctgcctcatagcaggctgccatgtcgcgggaggcgggctcatgccgcgtgggcacaggggcgagggcgcggtctcggaagcccaagaagccacactacatcccgcggccctggggcaaaccctacaactacaaatgcttccagtgccccttcacctgcctggagaagtcacacctctacaaccacatgaagtacagcctctgcaaggactccctgtccctgctgctagactccccagactgggcgtgccgccgtggctccaccacgcctaggccccacgcacccaccccagaccgccctggggagtccgaccccggcaggcaaccccagggagcacggcccacaggtgctgcccccgcgcctgacctcgtggtcgccgacatccactccctgcactgtggcggaggccccaagtccagggccaaggggtccccagggccaccaccccctgtggctagggccacccggaagggtcccggccccagtgggctcctgcctgagtcgtggaagccggggatgggaggggacccaaggggcgtgggtgcgggggacatggcctcagcaggccctgagggcagcgtcccctgctatcccccgcctgccccaggggagttccctgaggcccacagcctccacctgtctctgctgggcgtcaactacccgctcagccccggcctcttctcctacttggggccctcactggccgctgcagcccatgtgcccttcctggcctcggccagccccctgctgcccccggccacggccttcccagccgtgcagccccctcagcgccccaccccggccccccgcctgtactacccgctgcttctggagcacactctggggctgccagcaggcaaagctgcccttgccaaggcccctgtctcccccaggagcccctctgggactccggctcctggcctgctgaaggtgccagttccagggctggggccctggccccgagtcacccccagggacccagggcaggagggggagctggagcgggcagcccagagtgaccccaggaggaggctgtccctgggaagcaggctggagcttccgaaggcatcccccagcctgacaaggttctgttcccggagcagcctgcccaccggctcctctgtgatgctgtggcctgaggacggggatccaggcggccctgagacccccggccctgagggccccctccccctgcagccacggggcccagtgccaggaagcccggagcatgtgggcgaggacctgacccgagccctcggtgactacgccagggtggagcagcgcctgggacagttggggcccgcggggggcctggccccgagacccctgcgggagcagctgggcaagatccgcctggagctgctcaccattcaccaggcgctggagcaggccgtgaggccgccagacgcacccctcgacctctctgtgaaacgtgcgcccgccaaggggccccaggctcttggagaggcgtgggggcggcccgagctgggtcccgtgttgaccgggggcacccccgagccacccggcatgctgggccctgcagcgccccaacccttctctggccacaccaccaagtgtgaggccgactccagcgtcccacccccagggctccccctcgcagccccagatgaccctgtcattcctggcagtggctggggcacctgtgttgcgacgaggagttcccagacccctgaggctgtctgtggcctgcagagcccccagggcgccgaggtctgacctgcagcgcctgaggtccgactgtctctgcctgcagcatgccggcccctctcctgcagcccctgcccctcacctgcctgggacctgccccgcctccgcatgcatgtggatagacccccacgggccgtggccaacgcttgtccctggggccacacagggacactggaggtcacagttatttattgatcacaattgtggacattaaaacagaaactgttcacaaaaaaaaaaaaaaaaaaaaaaaaaaaaa

SEQ ID NO: 370 - protein, 571 aa, Homo sapiens
MSREAGSCRVGTGARARSRKPKKPHYIPRPWGKPYNYKCFQCPFTCLEKSHLYNHMKYSLCKDSLSLLLDSPDWACRRGSTTPRPHAPTPDRPGESDPGRQPQGARPTGAAPAPDLVVADIHSLHCGGGPKSRAKGSPGPPPPVARATRKGPGPSGLLPESWKPGMGGDPRGVGAGDMASAGPEGSVPCYPPPAPGEFPEAHSLHLSLLGVNYPLSPGLFSYLGPSLAAAAHVPFLASASPLLPPATAFPAVQPPQRPTPAPRLYYPLLLEHTLGLPAGKAALAKAPVSPRSPSGTPAPGLLKVPVPGLGPWPRVTPRDPGQEGELERAAQSDPRRRLSLGSRLELPKASPSLTRFCSRSSLPTGSSVMLWPEDGDPGGPETPGPEGPLPLQPRGPVPGSPEHVGEDLTRALGDYARVEQRLGQLGPAGGLAPRPLREQLGKIRLELLTIHQALEQAVRPPDAPLDLSVKRAPAKGPQALGEAWGRPELGPVLTGGTPEPPGMLGPAAPQPFSGHTTKCEADSSVPPPGLPLAAPDDPVIPGSGWGTCVATRSSQTPEAVCGLQSPQGAEV

SEQ ID NO: 371 - DNA, 2614 bp, Homo sapiens
  CDS (157)..(2298)
agcccccaagagctctgtgcgggattctaggctcccctgtgacagccgcggcaggaagcaggcgggcgctccccggccacaggcctgttgttctcggaagggagaaagctggacatttccccacgtaactcccagctctgggcctagagtgcgtgcatggcgaagtccccggagaactctaccctggaggagattctggggcagtatcaacggagtctccgggaacatgccagcagaagcattcaccaactgacatgtgccctgaaagaaggcgatgtcactattggagaagatgcaccaaatctttcttttagcaccagtgtgggaaatgaggacgccaggacagcctggcccgaattacaacagagccatgctgttaatcagctcaaagatttgttgcgccaacaagcagataaggaaagtgaagtatctccgtcaagaagaagaaaaatgtcccccttgaggtcattagaacatgaggaaaccaatatgcctactatgcacgaccttgttcatactattaatgaccagtctcaatatattcatcatttagaggcagaagttaagttctgcaaggaggaactctctggaatgaaaaataaaatacaagtagttgtgcttgaaaacgaagggctccagcaacagctaaaatctcaaagacaagaggagacactgagggaacaaacacttctggatgcatccggaaacatgcacaattcttggattacaacaggtgaagattctggggtgggcgaaacctccaaaagaccattttcccatgacaatgcagattttggcaaagctgcatctgctggtgagcagctagaactggagaagctaaaacttacttatgaggaaaagtgtgaaattgaggaatcccaattgaagtttttgaggaacgacttagctgaatatcagagaacttgtgaagatcttaaagagcaactaaagcataaagaatttcttctggctgctaatacttgtaaccgtgttggtggtctttgtttgaaatgtgctcagcatgaagctgttctttcccaaacccatactaatgttcatatgcagaccatcgaaagactggttaaagaaagagatgacttgatgtctgcactagtttccgtaaggagcagcttggcagatacgcagcaaagagaagcaagtgcttatgaacaggtgaaacaagttttgcaaatatctgaggaagccaattttgaaaaaaccaaggctttaatccagtgtgaccagttgaggaaggagctggagaggcaggcggagcgacttgaaaaagaacttgcatctcagcaagagaaaagggccattgagaaagacatgatgaaaaaggaaataacgaaagaaagggagtacatgggatcaaagatgttgatcttgtctcagaatattgcccaactggaggcccaggtggaaaaggttacaaaggaaaagatttcagctattaatcaactggaggaaattcaaagccagctggcttctcgggaaatggatgtcacaaaggtgtgtggagaaatgcgctatcagctgaataaaaccaacatggagaaggatgaggcagaaaaggagcacagagagttcagagcaaaaactaacagggatcttgaaattaaagatcaggaaatagagaaattgagaatagaactggatgaaagcaaacaacacttggaacaggagcagcagaaggcagccctggccagagaggagtgcctgagactaacagaactgctgggcgaatctgagcaccaactgcacctcaccagacaggaaaaagatagcattcagcagagctttagcaaggaagcaaaggcccaagcccttcaggcccagcaaagagagcaggagctgacacagaagatacagcaaatggaggcccagcatgacaaaactgaaaatgaacagtatttgttgctgacctcccagaatacatttttgacaaagttaaaggaagaatgctgtacattagccaagaaactggaacaaatctctcaaaaaaccagatctgaaatagctcaactcagtcaagaaaaaaggtatacatatgataaattgggaaagttacagagaagaaatgaagaattggaggaacagtgtgtccagcatgggagagtacatgagacgatgaagcaaaggctaaggcagctggataagcacagccaggccacagcccagcagctggtgcagctcctcagcaagcagaaccagcttctcctggagaggcagagcctgtcggaagaggtggaccggctgcggacccagttacccagcatgccacaatctgattgctgacctggatggaacagagtgaaataaatgatttacaaagagatatttacattcatctggtttagacttaatatgccacaacgcaccacgaccttcccagggtgacaccgcctcagcctgcagtggggctggtcctcatcaacgcgggcgctgtccccgcacgcagtcgggctggagctggagtctgactctagctgagcagagctcctggtgtatgttttcagaaatggcttgaagttatgtgtttaaatctgctcattcgtatgctaggttatacatatgattttcaataaatgaactttttaaagaaaaaaaaaaa

SEQ ID NO: 372 - protein, 713 aa, Homo sapiens
MAKSPENSTLEEILGQYQRSLREHASRSIHQLTCALKEGDVTIGEDAPNLSFSTSVGNEDARTAWPELQQSHAVNQLKDLLRQQADKESEVSPSRRRKMSPLRSLEHEETNMPTMHDLVHTINDQSQYIHHLEAEVKFCKEELSGMKNKIQVVVLENEGLQQQLKSQRQEETLREQTLLDASGNMHNSWITTGEDSGVGETSKRPFSHDNADFGKAASAGEQLELEKLKLTYEEKCEIEESQLKFLRNDLAEYQRTCEDLKEQLKHKEFLLAANTCNRVGGLCLKCAQHEAVLSQTHTNVHMQTIERLVKERDDLMSALVSVRSSLADTQQREASAYEQVKQVLQISEEANFEKTKALIQCDQLRKELERQAERLEKELASQQEKRAIEKDMMKKEITKEREYMGSKMLILSQNIAQLEAQVEKVTKEKISAINQLEEIQSQLASREMDVTKVCGEMRYQLNKTNMEKDEAEKEHREFRAKTNRDLEIKDQEIEKLRIELDESKQHLEQEQQKAALAREECLRLTELLGESEHQLHLTRQEKDSIQQSFSKEAKAQALQAQQREQELTQKIQQMEAQHDKTENEQYLLLTSQNTFLTKLKEECCTLAKKLEQISQKTRSEIAQLSQEKRYTYDKLGKLQRRNEELEEQCVQHGRVHETMKQRLRQLDKHSQATAQQLVQLLSKQNQLLLERQSLSEEVDRLRTQLPSMPQSDC

SEQ ID NO: 373 - DNA, 2408 bp, Homo sapiens
  CDS (238)..(825)
gggtgcgcgggcacgcgggactcccagctgtcaatcaggcgcgggctgagctctacgaggcggagcggcggcggtggcgacggcgatgggaccccagcgagagatctgcagctaggctggctgcacttgctccacgggtcaggggatcggagggggattgaagaatgcgccattaaaaggaaagatcaaggagtaaaccagaagaagaagaaaaagaggacttcaaagctgggaaggatgagttcttgcagcaacgtctgtgggtccaggcaggcacaggctgcagctgagggtggttaccagcgctatggagtccggtcctacctgcaccagttttatgaggactgtacagcctcaatttgggagtatgaggatgatttccagatccaaagatcacctaacaggtggagctcagtattctggaaggttggactcatctcaggtacagtttttgtgatcctcggattgactgttctggcagtgggctttcttgtgccccccaaaatcgaagcatttggcgaagccgattttgtggtggtcgacacacatgctgtccagtttaacagtgctctggacatgtacaagctggcaggagctgttctcttctgcattggaggcacgtccatggcagggtgcctgctgatgtcggtgtttgtaaagagctactccaaagaagaaaaattcctccagcagaagtttaaagaacgaatcgcagacatcaaagcccacacccagccggttacaaaagctccagggccaggggaaacaaagattccagtcactttgtccagggttcaaaatgtccagcctctactggcaacctgaaacctttcccaccccagttcttcttgtctgatttatgcccgtggttaaaaagagcaggccagttttcgagataaagaagatttggcgttgactgccctagggctgtgttcagctgtgggcaatataatgggtggactcacacttgctcagttcaggcagctctgctggagggcggtgccatgcctaagcctgtgcacatgcatccagctgcttaagatgggtgcttccttgtacccggccaccagaaaacccctggaactcctctttcatagatcgtgactttgtgttattttccgtgttgtttgaaagtgccgaacagtttagaccagctcaccaatggctaatgtggtccattttattttctaatattggtttatctaatgttttctgcgtggtgctgtcttccattcctgtctcactatgtgtaagattttgtcatatgtgttcatagaaacatggaattctctgattttgagccgaacatgagtttttagactgtatcttgacatgaggttcctgacattggatacaaagttatcagcattcacaaatctttttgttttctccattttttttccctttgagatgaagtgctgttcttttgcctaggttggagtacagcggtgaaatcatagcgcactgcagccttgaactcctgggctcaagcgatcctcccacctcagcctcccaagtagctgggactacaggcacctgccaccacccccagttaatattttttttaattttttttagaggcaggatcttgctgtccaattttttttaaaaagctaaaattgccaactttagaatcttgaccaaaaaaaattaattttaggagcatctatttatgcagtgttcaaaagtactgaattagaaaccaggaagttttagttccttctactacctgtgtgatcttggggaaattatttaacctctcagtcctaattttccccttctgtataatgggagttctggatcacaatatgtctgggctctcattacccaaacatctgagattccatttttgccatgtgtcatcgagtcgctccccaacagatgtttgtgatgtttttgtggctgtcaccatggtgggattctttcagaatgagactcctggaaattcactgagtcagcagccttcacaccatctacccttaaatatccaaccccagcaatttatacaacgctgtcatatttttaaaaaaacaaaagtaagccatcctcaaataaggaaccccttggtagatattaaccttaaaaagggttttcattctcaaacaagatgctttgttctccaacaagatgttcatctcatcacttgcacttttgttttaatgtatggattcagattagactgagaaaaatggatggtattttcttaaaattgtgccaccttagagcccccccccttttttttttcttccttcactggataaataaaatatgtgaacaagtggaacctgaattgcattgtcattccttcagtgtggttattttctctccaacatgtaattttccattctgagactgaataagctctgatgtttccccggctaaatggaagaataaatgaagcaattagt

SEQ ID NO: 374 - protein, 195 aa, Homo sapiens
MSSCSNVCGSRQAQAAAEGGYQRYGVRSYLHQFYEDCTASIWEYEDDFQIQRSPNRWSSVFWKVGLISGTVFVILGLTVLAVGFLVPPKIEAFGEADFVVVDTHAVQFNSALDMYKLAGAVLFCIGGTSMAGCLLMSVFVKSYSKEEKFLQQKFKERIADIKAHTQPVTKAPGPGETKIPVTLSRVQNVQPLLAT

SEQ ID NO: 375 - DNA, 3837 bp, Homo sapiens
  CDS (127)..(1887)
actccagacggcgggccgccccctcttcccgccttcctactaccggcccaggattagcgccctgggagcgcgcgccccgctgcctcgccgccacactttcctgggagcggcggccacggaggcaccatgaagaagtcttactcaggaggcacgcggacctccagtggccggctccggaggcttggtgactccagtggcccagccttgaaaagatcttttgaggtcgaggaggtcgagacacccaactccaccccaccccggagggtccagactcccctactccgagccactgtggccagctccacccagaaattccaggacctgggcgtgaagaactcagaaccctcggcccgccatgtggactccctaagccaacgctcccccaaggcgtccctgcggagggtggagctctcgggccccaaggcggccgagccggtgtcccggcgcactgagctgtccattgacatctcgtccaagcaggtggagaacgccggggccatcggcccgtcccggttcgggctcaagagggccgaggtgttgggccacaagacgccagaaccggcccctcggaggacggagatcaccatcgtcaaaccccaggagtcagcccaccggaggatggagccccctgcctccaaggtccccgaggtgcccactgcccctgccaccgacgcagcccccaagagggtggagatccagatgcccaagcctgctgaggcgcccaccgcccccagcccagcccagaccttggagaattcagagcctgcccctgtgtctcagctgcagagcaggctggagcccaagccccagccccctgtggctgaggctacaccccggagccaggaggccactgaggcggctcccagctgcgttggcgacatggccgacacccccagagatgccgggctcaagcaggcgcctgcatcacggaacgagaaggccccggtggacttcggctacgtggggattgactccatcctggagcagatgcgccggaaggccatgaagcagggcttcgagttcaacatcatggtggtcgggcagagcggcttgggtaaatccaccttaatcaacaccctcttcaaatccaaaatcagccggaagtcggtgcagcccacctcagaggagcgcatccccaagaccatcgagatcaagtccatcacgcacgatattgaggagaaaggcgtccggatgaagctgacagtgattgacacaccagggttcggggaccacatcaacaacgagaactgctggcagcccatcatgaagttcatcaatgaccagtacgagaaatacctgcaggaggaggtcaacatcaaccgcaagaagcgcatcccggacacccgcgtccactgctgcctctacttcatccccgccaccggccactccctcaggcccctggacatcgagtttatgaaacgcctgagcaaggtggtcaacatcgtccctgtcatcgccaaggcggacacactcaccctggaggagagggtccacttcaaacagcggatcaccgcagacctgctgtccaacggcatcgacgtgtacccccagaaggaatttgatgaggactcggaggaccggctggtgaacgagaagttccgggagatgatcccatttgctgtggtgggcagtgaccacgagtaccaggtcaacggcaagaggatccttgggaggaagaccaagtggggtaccatcgaagttgaaaacaccacacactgtgagtttgcctacctgcgggaccttctcatcaggacgcacatgcagaacatcaaggacatcaccagcagcatccacttcgaggcgtaccgtgtgaagcgcctcaacgagggcagcagcgccatggccaacggcatggaggagaaggagccagaagccccggagatgtagacgccaccctgcccacccccgggatcctgcccccaagtcatttccgtccccccccaggccctcccaccaccccattttattttatatgattttctccatttgtcatcgttccccaccccttcgacatgctgccaggaaacaagggaaggggcctccctccgagtgagtcagtgatgaggccgcggcctccccgaggttgtggggaggctgcactggagccacaggcaggggtgagagcacccactgaattgacatgaccctctgtccccaggcctggctccccgagggctcagaagagcagcttcggtgtgcagatcatccgtctgtgtggggttctcagtgccggaggccttggggtgggggccaggcctcgcacttgcagaggagcccagtgggctgcacgctcccctccatccccatcggccctgtcccctggagtgtgtcagagcccaggggagaatgcagcccaccaggagcacctggaccccctgcccgccacatggtgtggccatcactcagcccctacccctgccctgctcctaagggtagaaaactccagggtcccctgccaccgactgcccagccactccaagccccctggcagctgcccctcctggagcagaaagtgcctttatctcagccatccgcagactgcttggccagatgcggggacaggctggaatgagggaggcgtcttcatctccctgccatccccctctcacgccacccccgcccccaccgggctgcaggtgctgctgatgcgctgggatctgattgaggataaaaaggaaggagagatgacccctaccccctcatcccccagttttgaaaaggtctaagcaagtgagtctggtggaggagctgagggagggagccatggaaggtgccagaaggaaggttggcgggggcacgtgtgggccgtggcttgggctggtcagagtggcgtgagctgcccggcgcctgccctgcccaagtgaccagggaagtgtgtgtgtgtccatgtgtatgcgtgtccgtctgtctgtctagtgtctgggtttggcccaagactgggctgtagttacattaatgcccagccagccacccctgccactcacccctcctggcccaggccttgctgactctctgagctggggaggtgggaggccaggcgagcctgactctgttgatctacccgtgcctgggcccctcccctcagagcccatggtaacgaacccctagaaaggagagaacgggcgtcaggggtgcacagtccacagctgaagagcaaggtttcgtggcagcacggcccggcccctcaccctctgtccccacgaggggacccatgggggctgtctttgcagggcacagatgaccaaagtcccttcctgcttcctgttacctgtcttgctcctggggagaaagaggggcctgatgagactccactcaggtgcacacatcaccaggtgcatctgcaggcaccgggctggctgcttgcagccaggagaaggtcagcgagaaggagtgtatgagtgtgagtgtgtgtgcatggaagttggggcactgggcgtctgactccctccccacccaagagaggaaggacccctcaccacccccactggcgagacagtttactttgccgacttgccatgtttttgccaaaaccaagattttgaaggaaatgagtggccagcgccagggcccaggccatgtggcctgcccagcctcaatgtcacttggtggcggggtggggtgggggtgggcagcagcatcccagccttgagatgcttcactttccttctctgtaaccagactttgaaaaattgttcgtttcatcaggctctgttcctcaatggccttttgctacgtgcctcccgagaaatttgtctttttgtataaatgacaaagtgttgaaaatgtatttcctgaaataaatgtttcaaatgcagaaacccagaaaaaaaaaaaaaa

SEQ ID NO: 376 - protein, 586 aa, Homo sapiens
MKKSYSGGTRTSSGRLRRLGDSSGPALKRSFEVEEVETPNSTPPRRVQTPLLRATVASSTQKFQDLGVKNSEPSARHVDSLSQRSPKASLRRVELSGPKAAEPVSRRTELSIDISSKQVENAGAIGPSRFGLKRAEVLGHKTPEPAPRRTEITIVKPQESAHRRMEPPASKVPEVPTAPATDAAPKRVEIQMPKPAEAPTAPSPAQTLENSEPAPVSQLQSRLEPKPQPPVAEATPRSQEATEAAPSCVGDMADTPRDAGLKQAPASRNEKAPVDFGYVGIDSILEQMRRKAMKQGFEFNIMVVGQSGLGKSTLINTLFKSKISRKSVQPTSEERIPKTIEIKSITHDIEEKGVRMKLTVIDTPGFGDHINNENCWQPIMKFINDQYEKYLQEEVNINRKKRIPDTRVHCCLYFIPATGHSLRPLDIEFMKRLSKVVNIVPVIAKADTLTLEERVHFKQRITADLLSNGIDVYPQKEFDEDSEDRLVNEKFREMIPFAVVGSDHEYQVNGKRILGRKTKWGTIEVENTTHCEFAYLRDLLIRTHMQNIKDITSSIHFEAYRVKRLNEGSSAMANGMEEKEPEAPEM

SEQ ID NO: 377 - DNA, 2453 bp, Homo sapiens
  CDS (225)..(1277)
cagacatgagctgtgagggtcaagcacagctatccatcagatgatctactttcagccttcctgagtcccagacaatagaagacaggtggctgtacccttggccaagggtaggtgtggcagtggtgtctgctgtcactgtgccctcattggcccccagcaatcagactcaacagacggagcaactgccatccgaggctcctgaaccagggccattcaccaggagcatgcggctccctgatgtccagctctggctggtgctgctgtgggcactggtgcgagcacaggggacagggtctgtgtgtccctcctgtgggggctccaaactggcaccccaagcagaacgagctctggtgctggagctagccaagcagcaaatcctggatgggttgcacctgaccagtcgtcccagaataactcatcctccaccccaggcagcgctgaccagagccctccggagactacagccagggagtgtggctccagggaatggggaggaggtcatcagctttgctactgtcacagactccacttcagcctacagctccctgctcacttttcacctgtccactcctcggtcccaccacctgtaccatgcccgcctgtggctgcacgtgctccccacccttcctggcactctttgcttgaggatcttccgatggggaccaaggaggaggcgccaagggtcccgcactctcctggctgagcaccacatcaccaacctgggctggcataccttaactctgccctctagtggcttgaggggtgagaagtctggtgtcctgaaactgcaactagactgcagacccctagaaggcaacagcacagttactggacaaccgaggcggctcttggacacagcaggacaccagcagcccttcctagagcttaagatccgagccaatgagcctggagcaggccgggccaggaggaggacccccacctgtgagcctgcgacccccttatgttgcaggcgagaccattacgtagacttccaggaactgggatggcgggactggatactgcagcccgaggggtaccagctgaattactgcagtgggcagtgccctccccacctggctggcagcccaggcattgctgcctctttccattctgccgtcttcagcctcctcaaagccaacaatccttggcctgccagtacctcctgttgtgtccctactgcccgaaggcccctctctctcctctacctggatcataatggcaatgtggtcaagacggatgtgccagatatggtggtggaggcctgtggctgcagctagcaagaggacctggggctttggagtgaagagaccaagatgaagtttcccaggcacagggcatctgtgactggaggcatcagattcctgatccacaccccaacccaacaaccacctggcaatatgactcacttgacccctatgggacccaaatgggcactttcttgtctgagactctggcttattccaggttggctgatgtgttgggagatgggtaaagcgtttcttctaaaggggtctacccagaaagcatgatttcctgccctaagtcctgtgagaagatgtcagggactagggagggagggagggaaggcagagaaaaattacttagcctctcccaagatgagaaagtcctcaagtgaggggaggaggaagcagatagatggtccagcaggcttgaagcagggtaagcaggctggcccagggtaagggctgttgaggtaccttaagggaaggtcaagagggagatgggcaaggcgctgagggaggatgcttaggggacccccagaaacaggagtcaggaaaatgaggcactaagcctaagaagttccctggtttttcccaggggacaggacccactgggagacaagcatttatactttctttcttcttttttatttttttgagatcgagtctcgctctgtcaccaggctggagtgcagtgacacgatcttggctcactgcaacctccgtctcctgggttcaagtgattcttctgcctcagcctcccgagcagctgggattacaggcgcccactaatttttgtattcttagtagaaacgaggtttcaacatgttggccaggatggtctcaatctcttgacctcttgatccacccgacttggcctcccgaagtgatgagattataggcgtgagccaccgcgcctggcttatactttcttaataaaaaggagaaagaaaatcaacaaatgtgagtcataaagaagggttagggtgatggtccagagcaacagttcttcaagtgtactctgtaggcttctgggaggtcccttttcaggggtgtccacaaagtcaaagctattttcataataatactaacatgttatttgccttttgaattctcattatcttaaaattgtattgtggagttttccagaggccgtgtgacatgtgattacatcatctttctgacatcattgttaaaaaaaaaaaaaaaaaa

SEQ ID NO: 378 - protein, 350 aa, Homo sapiens
MRLPDVQLWLVLLWALVRAQGTGSVCPSCGGSKLAPQAERALVLELAKQQILDGLHLTSRPRITHPPPQAALTRALRRLQPGSVAPGNGEEVISFATVTDSTSAYSSLLTFHLSTPRSHHLYHARLWLHVLPTLPGTLCLRIFRWGPRRRRQGSRTLLAEHHITNLGWHTLTLPSSGLRGEKSGVLKLQLDCRPLEGNSTVTGQPRRLLDTAGHQQPFLELKIRANEPGAGRARRRTPTCEPATPLCCRRDHYVDFQELGWRDWILQPEGYQLNYCSGQCPPHLAGSPGIAASFHSAVFSLLKANNPWPASTSCCVPTARRPLSLLYLDHNGNVVKTDVPDMVVEACGCS

SEQ ID NO: 379 - DNA, 10923 bp, Homo sapiens
  CDS (223)..(1431)
attcatttcctgagaactgcagagagccgctgagaggctctgcgtgtgcgtgtgcgcgggtgacgccgtgtgtgtgcgagtgtgtgtgtgtgtgtgcgcgcgcgcgtgtgagagagagaaagggagagagagagggggactctgtgtgagggaaagaaaacaatttctcctgctctgcagcttctgttcaggatcaatgtgactctaagaacaaatggatgaatgaatatccatatgaagagaaaaacaataaagaatatcaacacctttgagaacagaatgttaatgcttgatgggatgccggcagtcagagtcaaaacagagcttttggaatctgaacaagggtctccaaacgtccacaactatcccgatatggaagccgttcccctgttgctaaataatgtgaaaggggagcccccggaggactcgttatctgtagatcacttccaaacacaaactgagccagtggacttgtcaataaacaaagccaggacgtcccctactgccgtttcatcctccccagtttccatgacagcatctgcctcctcaccttcttcaacttcaacctcttcatcgtcttctagtcgtctagcctcatccccaactgttatcacatcagtatcttcagcgtcatcttcgtcaacagtattaactccagggccccttgtggcctctgcatctggtgttggaggccagcagtttttgcacattatccatcccgtaccgccttcaagtcccatgaatttacagtctaacaaactgagtcatgttcaccgcatccccgtggtggtacagtcggtgcctgttgtctacacagctgtaaggtcacctggaaatgtgaacaacactattgtcgtgccgcttttggaggatgggagaggccatggcaaagcacaaatggacccccgaggcctatctcccagacaaagtaaaagtgacagtgatgatgatgacctgccaaatgtgaccttagatagcgttaatgaaactggatctacggccctttccatagccagagcagtacaagaggtacatccgtccccagtatcaagggtccggggcaatcgaatgaataatcaaaagtttccttgttcaatttcaccatttagtattgagagcacaagacgccagagacggtctgaatccccagactccagaaaacggcgtatccacagatgtgattttgagggatgcaacaaagtgtacacaaaaagttctcacctgaaggctcaccggaggacacatacaggagagaaaccttacaagtgtacctgggaaggctgcacctggaagttcgctcgttcagatgaactgacgaggcattaccgcaaacatacgggagtgaagccattcaagtgcgcggactgtgatcgcagcttttcccggtcagatcatttggccctgcaccgccggaggcatatgttggtgtgaggaatgctacctgtccagctgagcgtaagagctggatctcttagcggcacccaattcagcagggctgaatccccttcacagtgttaacacaaaagggcatcaccatcccacgatgtctgaaaccagagcaggaaaaagaaggcacacttcttttggtctgaaggtaacccccatcatgactagacgagaaccgtctttacccgggcctgggagctcagtgacataaatgctgaagagacaggcattgttttccgtgctgtgtcctctgccatttaaagatgtttgtagcttgtacattttctgagctgtcagacattttgttattgataccttaaaggtcacctaccacaaattgatggctagagcaagaccttttaaatttggatgaatctcccatcatcccatcccttaacccctttttacagaaattttagttacaatctgagtaagctagaacacacatccaatctgttaccagcaagcagcatgaaagtagaaacgaagaagcagatggagaggtcccattacctgcaaagaaagggcactcaggcagccctttgcaatcgcgatggcagccactagatatcactctcaacttgtcattctgccatgccctgaagaaaaccaacattgaatctttcatttgtttgtcgttgattgtttttgttttgtttcgattctgttttgttcatctgttcgagcagaggggcagttgaagtctcgtcctggtctctgccctggcatggactggcacagaggtgttctgtagttgaataggaagagcctgtctaaaaaactactgccccacttcaaattgcagtgttctgtcacctaggcatcatctcttcctgcccctagtatttgattacaaggaaccaggggaaaaaaactttcttagacacactggcaccaaggtaagaggtggggctgcccaggcaaagtcagtgaacatgaaaactcagacaaagcagagatggaaataatgcgcctcttgaggagaaaagcaataatgaataaaaggactttcctacaataacttcactgaggactcacgttaccaattttcatacttactaaagggattgtaaaaaacaccccagcattttaggtgtcttggttccatttacagcactgaggtaatctttctgctgtttgttgtcctgcttggttgagtaccacaattaaagattatgctccccttttcttgtttgaaaacagttatttggtgactagaaaggcaagggaggcatagccgggaattaactcttcggttaatgggtcagttctccttggaactgaatcagtggaaagagaatgcttcccatagaaagcccgacatggtgctagtttcctctcttggagagccaaggataagtgactctccaataggttcttctataccgatttcattttctaaactgtatcaggacccaggtgtcctgcattggcatctgcagggatattgaacccactcatcctgtgcagaggatgagaggaaggtgttagttccatcagccccataaaattatgaacctttttgcaactaggaacatatacagtaaacaagcaatacatcaccaacgagcattctttcagaaaaattaccatatttttgtccccaccacaagctgggtttttttccagctttctgtggctgaggggctggtgagattttttgttgttattgttgttgttgctagaattttttatagcttagatataaaaggtctccaacaaagacctttgcaatatattttaattacaaacacttgattttgggaattgcacatattaacctcacaatattactagctcatttttaaatgtctggacattctgaaataatttccggttacagaattaccctttttaggatcatcttctaattcagataatcttattctgatgaagcgagaactatgaacgttgaaacaaggacaatttgtgttggatggtattcaaaaggaattttttaaaacattaagcaacagtgtaatgattttcaggtcaaattatggcttcacaaatatgtgctctatattgtctgccaggtctcaaaaattcatcaagcaatttccctccaacaagggctgcagttctagtgataaatagcatctttagctgcacagtctactactcatcaaccagtgggttttttttagcacctggaaagtttttttgtactatatgcaactcctacttcacattgcctgtgaccattcagaatagaaaaaggtctgttgatgcatgccagtgctggttactagtcagtgacagagaacacagagagggacaaacacagccatgaaccccctggcactagtaccagcacctagttggcaagtagtgggtgcatctctcaagtgaagtgtagatttgtatttagtcctgcttgctctcataaaaagagccagttcttttctctgctgaaagatgtcttgagagtattacaggtagacttggtttttagaattcataaaactgacaggcaggggaatcttcctgagtgacagcttggtttaaatttagcacagaactagatgagttgcacttttctaataacataggatggatttggggaagggaacattttccctcatcctctgaaagtggaaaccagactgagatggtaagttaactgataaaacctgtcagcattccatcattttccccttttgacgtatcagtacttctaagaagggatctaagcacaattaagtgaattgagtccctggtctagcctcaggaactgaaacttctttggggcttgtcttgagacgtggcaaattctccttggtgagttttctaaaagtatttccccatggaaaggagaaagtggtttgggacagaaagaaatggaatgtcttcagtcatggaagagcctccatttcatctcatgtccatttctagcctctttcaaaaagcacagtgcatcatgagcaacagaaaagcagtagaatcctaaaggacataacagttgttccgtaactagaagcattctttgattttaaatttgaagctgttcagtttgcagctggggatatgtgcatggttgggaacttatacacatagagccattaactacttaagcagctgcagtagacctgattttctgtttgcagtatagagattgatttcaagggagttacattatttgaaaagttatgactttcagcctttgaggttttaagaatcccttttcatggtctgatcttaagttgtttgaaaaaagattcacgcttctgcatccacctctgccctcattctgtcaattgtgtgtggactctgagaagcctgcttgataacttgtcttaagttctattaaggcagttagactgagatttctaatgacttcaccataaagattatacttctgcctggcgtcgtttctataaaacactataggacatttgttttcaaaagcagttgagtaacagcaacataaaccacattttttaaaaaaatgagcacttttcattcacttgaaagcttaagtgggaaaaaggaagatgattgtcaggggaaaaacttacaaaatgctacagtgtttacaaatgccagttccaggtgattagaaaggccgttttcattatggttcagatttggaatagcttatgcaaagattgtgttcatttttatacaattctttttaactttaaattgccatctgtgttttaaacataattctgcactttggaatcagttcattagaatgataacatttatatggataaagatgcagtattccttattctgtacttgatttattatacttaccaaagctgcaactgaataaatctggtgaggtgaggccttcaaaatgtattaatacgcctttgttatgttgttatgactgcttagaaatgtagccatgatgttgttctaaagatgtcttaacatttatagtgaggattgacagaaattaagcagtgttaagaataccagcatccatgttacagtctgcgtataagggactgaatgtgaggtaactcttatgaatcataataggcccagaaagccttaatattcatagttcataatccagtctcagattttgctcttcaatgttgcctgtaaacttagcaggtaaatgtattctagtataaaacatcattgaccaaatctcttcctttagtttttctgaggtagtgcatcccattaaaaaagtctcttcaattagatttggctttagtttagaaaggggtttggtaagtcatgtcttccatatgacatttctactcatccccacactgccttccacttaacctgtacagacagccccaacacatgcacatgtgtgtacacaactgtatatgcagcagccagtgggctaacaaatatcagcaaagaacttttttaaaaagaatttgtaataatccgtgctgtctagaaatgtgagttacttaccttattaggaaaccggcttataatactatatatgactctgcctgcattttatagttaagaaatgtacataaaaattgctatattttcacagtttcattataatgtctgtttagtaacccatgtccactgatactttaaatatgctaattactgagcaattgcaatagaaatccagattttcataagaaaatgaaatagaaggatactgcatctttaaaaaatagagtgaagatattttactgtattcgtaacatatgtgatagtggaaaaagtattttcaaactcacaaattttacagaggttgtaaatagtttgatgaagtatgttgggaaagagagcttctagttttcatcacaataaaaagaaaaaacttgttcagatatgccttgtatatcttacacacaatgagtgaaattgccatgggaactctgtccaactttgtcagagcatgctcttcgtgttctgttcaaaatagagtggccacttgtcatggtttagccaggatggtttaaaatataatgaagtcattttaagttgcagacaactgattccaaactagtaatgtcttttcctgaaaagggcaaaacagctgcacaggattttgcttgtactaaagaggagcatcttacaattgttctcttttctcagttatctccctcctcaacagagtgtgaacaaccatacaggtgtttattcttgttttattccagggagactgcttttaggtataactacatgttgacaagattaagtgctgtggatatggccacgtgttaaaggaatctatactcgcaataggaataagctaatgcccattttcagaaataaattaaatgctgaaagtgcctgtcagtaaaccttatgaccaatgagatattcctatacttttacacagcaataattcttaataagactgggttttttcctgcacatgtgaacacacacacacatacacacagagagagtaaatacatacacatagtaaatcaaatctgttcacatgcccacaaaaaacgcttttatagctttcaaatatacctaatcttgtttacattaacatttcttaatttgatctttctaacttgcagaacgttaagaacacaaatctgaacattaagtttatcttcagtgaacactattgcatatggtaattataatttccagataaaaagttgactgtcatttgccccaaacttatgaaacagtatgtatgattcaaaaagttttgctcagttaaaaacaccaatttatttggcgcaaaagactgaaggatatttgtttgcttgttcattttatccactcatatcaaacgcacaaattcatctttacatttcttcattcccctttcccctaatatttcctattatcatcttaagaatcattttggaatgaatattgacagaatcatttctccccaaaaagtctgttgaagtaccactgacacttagtaagcctagcctttaaccatctttgcagttagtcctaaaaattaccagatgcacattcagaagctcacaggttttttcctgtaattactgtactgctaaaagtggagtcatggatagaaatatacaatgagactatatgaatagacatgaaccctggaaattctccaaccctgccatctcagagcacaaattcacccaaacaagctactgaggctatcagtaaaattatactcatggagagtcacacatcgggtaagggcaattttaaaagtaggactgtgattaaacattcaggctttagacttccatgatggactcagaccacaggcctcaaaaaaacatccactgttttctcctcccaatgttagaaagaagaaaagggagacggaaatgtaccaggataagggggtaaaataaccaattaagtgtcaaaggaaagctgctgggttccttaatctcactgaagtcaagtcttctgactgggcttcttaccatgtgttgtctgaaaaaactaaagtaccttgaaaggttacacattcagcaaaccatgaagataatagctattctttattaaacactgtgtgccaagcaatagactaggcaatttttagatacgttacctgcaacctgtacaacatttctacactttatggatgggaaacggagacatgggaagtgtggctgagttgttcatggatgtagaaatagtaaacggcagagtaggaaagtgaaaccgcctatctctgacctggaggtctgcctgtatctttcccactccaccacactgcacgtgggtgtcccgaaaccaccttcccagattcctgactctcagtaattttattatggacaacatgcatgagtagtcatcatatttttcaagtgaaatatcgggacatgatataacacatgacttaacaatggtactgaatatttgaaatcaggcctttcccggaaaatcatgcatgaaggatcattataaacaaacaatagcaaccagttgtctccccgaacttgtcacttttctcataaatgtctggcctggagctccaaaatcatccaaatacttagtagcattttagcctgagtacactttctcagttcctcaactctttgtatacctttccaccaatatagacattctagaatctgcttcagatgcatttgaaattttcacccccatggaactagtgattaatatcagagcccactcttgcagttggtaatggggtggcaatcaaacgttcagatgatgataaaggagagataatggataattctttttcagagttctcacttaacagctctgttgtggaatgttttaaatagtcttataaataatttgtttatagtattgttgttagtttaattgaattttatgtaagaagctgtccaacatcagagaaatgaaattcctcccactttctgtgtagaacaaggtctctgacagtattgattcatggaagtactaatggacttagaaaacattaagagaatgtcatttctcatagtgtttctgtttctgaaaatgaatctcctgaattattatctttctccctgttacttggctggggaaagagatagaagctgtataaacaaattctcttccatgctcaaagcaagtgttccatgtgcacaacctgctgcagactggggcccttctcagttaattgggtttcacaagcaataatttctccacaacaaaaaccacaacttgaagtgagttgaaaagagatcaatagtggaaacagtcgcctcagtactttttctttctggatttcatctctagaaatttgaagtgtttgagacagagtccaccctttgtgcaaggcgagaaccaatgaatggactccttgtgtgaattattgcatcttcttccaaagcaggttcatcaagactttcacagagattcatttttgttgagaagtaagggttaataggaggatagaatttggatccaaatctagtgataaaagtgtccaagcaatcaaaaagtaagatattttagggacataccaacatcttccctttctgctaatttcatgctccaaagatatggcaaaaaaaaaaatcataaaaagtgcttttgccctacttgtgttctagttttcccatggcagaattttgtaattacatccagaatatagtgtatattttgttcctcaaactttattacattggatggatattgttgaactggggcactggtgcctatattcaaggctctttcctatcaacgtgtctgtccacgatttgttgtgtttaaagcttcattttgaaaaatcactgtccccctgtggggtagtgactgtattgttttgttcatgtctatgtgggacacattgcatcacatggcaaaccaactctctgtggatgtgagataagtacttataaaaccagcttgaaaacatcgtcttatgtattatgtcatcctgcatcataatgcaattatgtgtatcataacatgctcatttaaaaaaagagaaaccagcaaattcatgtttgtccatagaagaatgtactcagaactttgtgttgtgaaacgatgagaacagaccacctttaagatacccacctgccacttaaaatgacttagttataattagtagtagtctagacgttgttcttggtgtgtgggggtcaattctaacgtcatgttcttttgaataaatctctcagtcatatttgaaaaaaaaatacatgggaataaagaaaaatatcatctttggccaaatcaagcaggcatcttttttcttttccttgacgtttagctcattatacgtggtgattggatcacgagatctgtccgtgtgaaaatacagaaacatcctttagtttacaaaacagttattctaggcttgaagcctctgaacagcaaattgaatagatgggctgcatctgatttgctttatggatgtaattttacaaaacactcttgggtctctgaccccagggagttaagagtgcccagaggaggtcctacacattaaaggataaagccccccagtgatgctggcaagcaaatgtgttgagttcttaaatcttcatttggttttctgttcaggattttaattgcaaatgaatttatttctccagtttatctaaagacctaatttcccaatagtttcctctgcatttatatactctgtagtgtttaggcaaccctgttataagtttattaatattatgtaagtgttgttcttgtatttatgtatagtgtatgtattgtaaatatactcagagcttttttccttttactgtaaaatggtgatttttttgccctatgataatgtaaagggagaccctcctaatgagattctctcagaggatgattattccagtctattctcagagatttaaatgaacaagtgttattgtttttaatggtgtctcagacatattctgttggtgcattgcttttctgtattcaactttcctatgaattgagctgtgaactgaaatagagtttaaacctttaactgtatgcatttgtataattatctgaatgaaggcatgaaggttaaataaagcattttgtatggaacaaaactccctaactgactcagacactttggaaatcatagttattaaccattctaattaaacctttgttatgaaaagttttaaaaaaaaaaaaaaa

SEQ ID NO: 380 - protein, 402 aa, Homo sapiens
MNIHMKRKTIKNINTFENRMLMLDGMPAVRVKTELLESEQGSPNVHNYPDMEAVPLLLNNVKGEPPEDSLSVDHFQTQTEPVDLSINKARTSPTAVSSSPVSMTASASSPSSTSTSSSSSSRLASSPTVITSVSSASSSSTVLTPGPLVASASGVGGQQFLHIIHPVPPSSPMNLQSNKLSHVHRIPVVVQSVPVVYTAVRSPGNVNNTIVVPLLEDGRGHGKAQMDPRGLSPRQSKSDSDDDDLPNVTLDSVNETGSTALSIARAVQEVHPSPVSRVRGNRMNNQKFPCSISPFSIESTRRQRRSESPDSRKRRIHRCDFEGCNKVYTKSSHLKAHRRTHTGEKPYKCTWEGCTWKFARSDELTRHYRKHTGVKPFKCADCDRSFSRSDHLALHRRRHMLV

SEQ ID NO: 381 - DNA, 2786 bp, Homo sapiens
  CDS (273)..(1376)
agtgttcttagaggtagccacacctcagcaagggctttctaacttggaacagcaaagttcaaatgaacgaatagacacaaactgtgaaagagtcctgaacccattacaaggtgaatctttacagcacaattgccttctgaagctacttgaaacagggcatgggacttaaaggagaaaaaaaaggaaatggaccatctcttctaacacctggaatgtgatccaagcctggagacaaattgatggtttgcagctagaagacagtaaatctagcaatggagcccatatatgaggagtacctagcaaatcatggaacaatagtaaaaccatattactggctaagcttctctctcgattgctctaattgtccttaccatattcgaacaggtgaagaagcaagagtttccctcacagaattttgtcagatttttggattcccttatgggacaacatttcctcaaacaaaacacctcacattttatgaactaaaaacttcttctggtagcctggtgcaaaagggccatgctagcagttgcactgggaattatatccatccagaatcaatgctctttgaaatgaatggttatcttgactcagccatatacaataatgacagcatcaggcatatcattctgtattccaacaactccccttgtaatgaagctaaccactgctgcatcagcaaaatgtataatttcctgattacgtatccaggcatcactcttagtatttatttttctcagctctatcatactgagatggactttcctgcctcagcatggaaccgcgaagctctccggagcctggccagcttatggccgcgggttgttttgagtccaataagtggtgggatctggcattctgttctccacagctttataagtggtgtctcaggatcacatgtttttcagcccattttaactgggagagcactggctgacaggcacaacgcatatgaaatcaatgccataacaggcgtaaaaccttacttcactgatgttcttctccagacaaaaaggaatccaaacacaaaagctcaggaggctttagagagctaccccttaaacaatgcctttcctggacagttttttcaaatgccgagtggacaactccaacccaacctacctccagacctcagggctcctgttgtttttgtgctagtgcctctcagggacttaccaccaatgcatatgggccaaaacccaaataaacccaggaatatcgtaaggcacttaaatatgcctcaaatgtcattccaggaaaccaaggaccttggaaggcttcccactggaaggtcagtggagatagtggaaatcacagaacagtttgcaagtagcaaggaggcagatgaaaagaagaagaagaaagggaagaaataaaatctacattcctacagcatgaaaccaattaccaagggacttattagataggcaataaaaatctggaaactttctctctcagggctgagccaagatggagataaactgatgcactaaaagcaaaccttgaattatttaccatatcaactattataaagttacactattttaaacataatccaaaatgtttccataagcaacttgatctctctcctttattttgaaagtggcagtatcaaaatggaaccattagcagcttgctaatattttgatgcagaaaaggaatctcattattctattttactcacatcatctttccactacaaaagcccatggacaaaatagctacctaaatttgtttcggtaaaaaatttactgtaaaattgaaaaacagcctgaagctactgacattaagtgctgtttgcaggagcaaaccagtgattttctattaattgttaatcatggacagaagattttaggcagctcatttttttctaaagtgattcaaaatagttttgtgtgggaaaaagctcttctgctgattacatatagctataaagattaaaacctagccacctgctcagtttgatcttccccagctcagacctctcccttctgagcagatgatagaggtaagatgatacatgagaacctccaatggctcctgtcatcacatactgtataaaatccaagttcctcttactggctttcaaggatcctcctttaacttcctgttgccttgtctcatcagcaagatcataagtacctacaggtcaagcactgtctctcccttctctttagcttttcccttaggatctagcacattacccagcaaaatgtgagtagcaaggctgaaatgacatctcaataacttcaccaatgattgtaactcagcatcccttctccatcccagctgaaagcctgcttcaccatcctgcaagagatgttttttctttttgttagcatccattcccctttctaatgcagctcccaatgcataatgtgtgttttacttccctctttctgactccatcctcgtcaccagtgaatatttgtaccttctcttaaaatcttcaaaacacacttctaggaagtgctccttgattaatcctctaagcacttaaatgaaagcactttgcttatgcttatttcacatttgctgccacttgcctctttgaaatatgtaaagatacattacaagaaaaatgtacattttctcgtaacttgctattaatttttttctttatatatatatataaagtaatcctaagctaataaaagagtttgccatgacattaaaacatttaatactccataagggaggaggagaaagaaaaacatattttaggaatagcaattagtattgtggttaaaataaacatgaataaaaattttaaaacaaaaaaaaaa

SEQ ID NO: 382 - protein, 367 aa, Homo sapiens
MEPIYEEYLANHGTIVKPYYWLSFSLDCSNCPYHIRTGEEARVSLTEFCQIFGFPYGTTFPQTKHLTFYELKTSSGSLVQKGHASSCTGNYIHPESMLFEMNGYLDSAIYNNDSIRHIILYSNNSPCNEANHCCISKMYNFLITYPGITLSIYFSQLYHTEMDFPASAWNREALRSLASLWPRVVLSPISGGIWHSVLHSFISGVSGSHVFQPILTGRALADRHNAYEINAITGVKPYFTDVLLQTKRNPNTKAQEALESYPLNNAFPGQFFQMPSGQLQPNLPPDLRAPVVFVLVPLRDLPPMHMGQNPNKPRNIVRHLNMPQMSFQETKDLGRLPTGRSVEIVEITEQFASSKEADEKKKKKGKK

SEQ ID NO: 383 - DNA, 1244 bp, Homo sapiens
  CDS (5)..(1060)
gcacatgcgcgctgtcctggctcgggagatggacggccgccgtgttttgggccggttctggagtggctggcggcggggcctgggtgtccgcccagtgcccgaggacgcaggctttggcaccgaagcccggcatcagaggcaaccccgcggctcctgccaacggtcggggcccctcggggaccagcccttcgcggggctgctgccaaaaaacctcagtcgggaggagctggttgatgcgctgcgggcagccgtggtggaccggaaaggacctctagtgacgttgaacaagccacagggtctaccagtgacaggaaaaccaggagagctgacgttgttctcagtgctgccagagctgagccagtccctagggctcagggagcaggagcttcaggttgtccgagcatctgggaaagaaagctctgggcttgtactcctctccagctgtccccagacagctagtcgcctccagaagtacttcacccatgcacggagagcccaaaggcccacagccacctactgtgctgtcactgatgggatcccagctgcttctgaggggaagatccaggctgccctgaaactggaacacattgatggggtcaatctcacagttccagtgaaggccccatcccgaaaggacatcctggaaggtgtcaagaagactctcagtcactttcgtgtggtagccacaggctctggctgtgccctggtccagctgcagccactgacagtgttctccagtcaactacaggtgcacatggtactacagctctgccctgtgcttggggaccacatgtactctgcccgtgtgggcactgtcctgggccagcgatttctgctgccagctgagaacaacaagccccaaagacaggtcctggatgaagccctcctcagacgcctccacctgaccccctcccaggctgcccagctgcccttgcacctccacctacatcggctccttctcccaggcaccagggccagggacacccctgttgagctcctggcaccactgcccccttatttctccaggaccctacagtgcctggggctccgcttacaatagtcctccctctgttcctgaccccctcacacacactggaaagtgagggtgggggctctgcagtcagacaaacctaagatcacatcctggacaggccacttgcttgctgtgtggcattgggcaagtaactttacctctctggacttgtgataataaaagttcctacctcaaaaaaaaaaaaaaaaaa

SEQ ID NO: 384 - protein, 351 aa, Homo sapiens
MRAVLAREMDGRRVLGRFWSGWRRGLGVRPVPEDAGFGTEARHQRQPRGSCQRSGPLGDQPFAGLLPKNLSREELVDALRAAVVDRKGPLVTLNKPQGLPVTGKPGELTLFSVLPELSQSLGLREQELQVVRASGKESSGLVLLSSCPQTASRLQKYFTHARRAQRPTATYCAVTDGIPAASEGKIQAALKLEHIDGVNLTVPVKAPSRKDILEGVKKTLSHFRVVATGSGCALVQLQPLTVFSSQLQVHMVLQLCPVLGDHMYSARVGTVLGQRFLLPAENNKPQRQVLDEALLRRLHLTPSQAAQLPLHLHLHRLLLPGTRARDTPVELLAPLPPYFSRTLQCLGLRLQ

SEQ ID NO: 385 - DNA, 1483 bp, Homo sapiens
  CDS (462)..(1082)
ccgcggcacccacgtgcagcggctgggcccggcgctttcaggggaccaccaggcccccagagcgccgtgctatgttgggggctagtcactagcacggggctggaagctgagatcaaagacgccaatgagccggcgtgggtggatgagtgaggcgggcaagaagcagcaccggttagcctgagggttcgctccagggccaggcctggagccagcgcccttacctgcccctggaaagtctgagaccactcggggcggggcggctgccggagggtgggctgcggctccgtggcgggttccagaggggcggagccaagggctgggcgttcccgcgggcggggcgtcccgggggcggggcgggcccctgtgtttgttgcaccgtgtcagttactttgtaacaaaagtgctgcagccgcttgctccggccggcaccctaggccggcccgccgccagctgtcgccgacatggaacccttggccagcaacatccaggtcctgctgcaggcggccgagttcctggagcgccgtgagagagaggccgagcatggttatgcgtccctgtgcccgcatcgcagtccaggccccatccacaggaggaagaagcgacccccccaggctcctggcgcgcaggacagcgggcggtcagtgcacaatgaactggagaagcgcaggagggcccagttgaagcggtgcctggagcggctgaagcagcagatgcccctgggggccgactgtgcccggtacaccacgctgagcctgctgcgccgtgccaggatgcacatccagaagctggaggatcaggagcagcgggcccgacagctcaaggagaggctgcgcagcaagcagcagagcctgcagcggcagctggagcagctccgggggctggcaggggcggccgagcgggagcggctgcgggcggacagtctggactcctcaggcctctcctctgagcgctcagactcagaccaagaggagctggaggtggatgtggagagcctggtgtttgggggtgaggccgagctgctgcggggcttcgtcgccggccaggagcacagctactcgcacggcggcggcgcctggctatgatgttcctcacccagggcgggcctctgccctctactcgtgccaggcccacttgccaggcaggagccctccccaagccttcagggctgctcggagtcacctgttggaatggactaaaaggacccttgtgtgggaacaggtgctccccaaacaccctgctgctggctgccaggcaggccctctggaagggaaggggcaggactcatcaggacctccctggacccctgcagggcaggcagcttgggcccgagcccaagcatttggctctgctgcccccaaggggacaggaagcctcttgggcctcttcccttcctggacaaggccccctgcctttgcctcacataaactgtacagtattttcattaaaagcctctttcataacttccaaaaaaaaaaaaaaaaaa

SEQ ID NO: 386 - protein, 206 aa, Homo sapiens
MEPLASNIQVLLQAAEFLERREREAEHGYASLCPHRSPGPIHRRKKRPPQAPGAQDSGRSVHNELEKRRRAQLKRCLERLKQQMPLGADCARYTTLSLLRRARMHIQKLEDQEQRARQLKERLRSKQQSLQRQLEQLRGLAGAAERERLRADSLDSSGLSSERSDSDQEELEVDVESLVFGGEAELLRGFVAGQEHSYSHGGGAWL

SEQ ID NO: 387 - DNA, 5041 bp, Homo sapiens
  CDS (238)..(2586)
aaaatggcggctgccactgtggggcttctgccggccggtagtccctggcgctgctgacccagcatcggcttttctacgtcttgaacctggattcgcctaggggttgggaagggctgtggacggcgttgggggaggcctgacgagattaataaagaactcttcagaattcctggtgtttcatcatatatacgactaagatatcaactcttctagcttgctgtttctggaccaaaaaaaatgacgtctattatcaaattaactaccctttctggggtccaagaagaatctgccctttgctatcttctccaagttgatgagtttagatttttattggactgtggctgggatgagcacttttctatggatattattgattccctgaggaagcatgttcaccagattgatgcagtgctgttgtctcaccctgatcctctccaccttggtgccctcccgtatgctgtcggaaagttgggtctgaactgtgctatctatgcaaccattcctgtttataaaatgggacagatgttcatgtatgatctttatcagtctcgacacaatacagaagattttacactctttacattagatgatgtggatgcagcctttgataaaatacagcagctaaaattctctcagattgtgaatttgaaaggtaaaggacatggcctgtctatcacacctctgccagctggtcatatgataggtggaacaatatggaaaatagtcaaagatggagaagaagaaattgtttatgcagttgacttcaaccacaagagggagatccatttaaatggatgttccctggaaatgctaagcaggccttccctacttatcacagattcattcaatgctacatatgtacagcctagaagaaaacagagagatgagcagcttctgacaaatgtcctggaaacacttcgaggtgatggaaatgtgttaatagcagtggacacagcaggcagagttttggaacttgctcaacttcttgatcagatttggaggactaaagatgcaggattgggtgtttactcattggcactcctaaataatgtcagttacaatgtggtggagttttctaagtcccaggtagaatggatgagtgataaattgatgagatgttttgaagacaaaagaaataatccgtttcagtttcgccatctctctttatgtcatggtctttctgacttggcccgtgtacctagccctaaagttgtacttgccagccaacctgacctggaatgcggattttcaagggatctctttattcagtggtgtcaggaccctaaaaactcaatcattctaacctacagaactactcctgggactttagcacgtttcctaattgataatccttctgaaaaaattacagaaatagagttgaggaaacgtgtgaagcttgaagggaaagaacttgaagaatacttggaaaaagagaaactaaagaaagaagctgccaaaaagcttgagcagtcaaaagaggcagatatagattccagtgatgagagtgatattgaggaagatattgaccagccatcagctcataagacgaagcatgacttgatgatgaaaggtgaaggcagtcgtaaaggaagttttttcaaacaggcaaaaaagtcctatcctatgtttcctgccccagaagaaagaattaaatgggatgaatatggagagattatcaaaccagaggatttcttagtgccagagcttcaagctactgaagaagaaaaaagcaaattagaatctggtttgacaaatggagatgaacctatggatcaggatttatctgatgttcctactaaatgtatttctacaacagagtctattgaaataaaagcccgggttacctacatagactatgaaggacgctctgatggggattccattaaaaaaatcattaatcagatgaaaccacgacagttgatcatcgtccatggcccaccagaggccagtcaagatctggcagagtgctgtcgcgcctttggtgggaaagatattaaagtgtacatgccaaagctacatgaaacagttgatgccactagtgaaactcacatctaccaggtgaggttaaaagactcacttgtcagctctcttcagttttgtaaggcaaaagatgctgaattagcttggatagatggtgtcttagatatgagagtttccaaagtggacacaggggttattttagaagaaggagaactaaaggatgatggagaagactcagagatgcaagtggaagctccctcagattctagcgttatagcacaacaaaaggccatgaaaagtctgttcggagatgatgaaaaagaaacaggtgaagaaagtgagatcattcctactttggaacccttgccacctcatgaggttcctggacatcagtcagtttttatgaatgaaccaaggctgtcagacttcaagcaagttctcttacgggaggggattcaagctgaatttgtaggaggtgtacttgtttgcaacaatcaagtagcagtccgcagaacggaaactggacgcattggattagaaggctgcctttgtcaagatttttataggataagagaccttttatatgaacaatatgccattgtataaaggacatgatgtcaagaagtatctgcttgacctttctaagaaaaagggattcttatcttactctgagcttttgatgttttgttttgtaacatacaaaaagaatctgccagaaaaacttacatgtatcagatttttaaaaatataaatagagaacattttgcaaatgctcaaatgagcattctatcttttggctttcagagtgatagagctcctaacaggtgtacaggcccaagagttgaaggtgattggttttctttacagactccttgttctctagaagggctttttacttgaataaaacaatgcaacttagcaaaccaatttatggccttagagaaacatttttgcatgagttcttacaaactgtttgttatattttctggaatgataagtgagaattatttagaaaagacatgctccaaaaaaaaaacaaaactgataaaacagtttttcgaaacttacttttaaaagcatacgtgctatgactctctccagtttgaatatgcaattgttttcacaggcaggatgtctgttttctgcctgtatttcccagtgatttactctagggtaaggtagtacacatttggttcagaaattaatttttatttctcctatatcttgttttatcaagattttgttgtggcatttcaatgtaaattataacaccatcatttgagtatacataattcaaaagaactacttgatgcagtatagtcttaagggttctgcatacattttagaaacatcttagccgtaagttaggtcctgtgttaaactgtttagtgctctgtttttaagaaaacaaatgttgaacctcacacttttatgtggtgacagtgtaatttaattaaaaggtgtaaatgttttcatctcttaggcttgctgtctcctaaggtcacccaagcagtggttggattttatacacattactactaaaataatactgaagttggataaggttatcctttctgtatttgcgtctttcttgtgactaaccaccctgatatagtattaaccactgtgttcaagagtaaaaacaatatatgcaattttcattgaacttaaagagtgaaaaccatgtaaactattgaaactattgtaatccattaatgcttttttagaatggcagaccttgatgtttatttctcaaatggttaagccctcttctttactcttaatttttttttgagacagagtcacccaggctggagtgcagtggtgagattttggctcactataacctcttcctccagggttcaagtgattctcccacctcagcctcccaagtagctgggactacgggcacatgccactgcacctggctaatttttatatttttggtagagacagggtttcaccatgttggccaggctggtctcaaactcctgacctcaagcgatccacccacctaggcctcccaaagtgctgggattacaggcatgaatcaccacaactagcctacccttagatttttggaaggatcgatcttatttaactatgtgtggaacaacccagtaatatcagactcgaattactatttcattctatttcaaatgcttataaagctactattgtagattatagtgttaatgcaaagtttacagacttttgatatggaaaaccagataaaacaatgttacaaaaggcaaatataaagagtatgttttctttttagtgctttggaaaaatttcacttaaactcttattactgtatagattaagccctataatgctatttatattccaggggaacgaaaatctgaatttgttttatgatttaaagcatctggtttgcatattgtattgtaatactgatacagtttggctgtgtccccaccaaattgaattgtgttaatagttcccataatccctacgtgttgtgggagggacccagtgggcagtaatttaatcatggtggtggttaccctcatgctgttcttgtgatggtgagttctcatgagatctgatgggtgtttttttttgttttgttttttgttttttgagatggagttttgctcttgttgcccagactggagtgcaatggcacacgatctcggctcaccgcaacctctgcctcctgggttcaagcgattctcctgcctcagcatctcgagtagctgggattacaggcatgcaccaccacgcccagctaattttgtatttttagtagagacggggtttctccatgttggttaggctggcctcaaactcccgacctcaggtgatccgcccgcctgggcctcccaaagtgctgggattacaggcgtgagccactgctcctggcccaagatctgatggttttgtaagggaattttccccctttgcttggcacttcttcctgctgccatgtgaagaaggatgtgtttgcttccccttccaccatgattgtaagtttcatgaggcctccccagcctgtgggactgtgagtcaattaaacgtgtttactttataaatt

SEQ ID NO: 388 - protein, 782 aa, Homo sapiens
MTSIIKLTTLSGVQEESALCYLLQVDEFRFLLDCGWDEHFSMDIIDSLRKHVHQIDAVLLSHPDPLHLGALPYAVGKLGLNCAIYATIPVYKMGQMFMYDLYQSRHNTEDFTLFTLDDVDAAFDKIQQLKFSQIVNLKGKGHGLSITPLPAGHMIGGTIWKIVKDGEEEIVYAVDFNHKREIHLNGCSLEMLSRPSLLITDSFNATYVQPRRKQRDEQLLTNVLETLRGDGNVLIAVDTAGRVLELAQLLDQIWRTKDAGLGVYSLALLNNVSYNVVEFSKSQVEWMSDKLMRCFEDKRNNPFQFRHLSLCHGLSDLARVPSPKVVLASQPDLECGFSRDLFIQWCQDPKNSIILTYRTTPGTLARFLIDNPSEKITEIELRKRVKLEGKELEEYLEKEKLKKEAAKKLEQSKEADIDSSDESDIEEDIDQPSAHKTKHDLMMKGEGSRKGSFFKQAKKSYPMFPAPEERIKWDEYGEIIKPEDFLVPELQATEEEKSKLESGLTNGDEPMDQDLSDVPTKCISTTESIEIKARVTYIDYEGRSDGDSIKKIINQMKPRQLIIVHGPPEASQDLAECCRAFGGKDIKVYMPKLHETVDATSETHIYQVRLKDSLVSSLQFCKAKDAELAWIDGVLDMRVSKVDTGVILEEGELKDDGEDSEMQVEAPSDSSVIAQQKAMKSLFGDDEKETGEESEIIPTLEPLPPHEVPGHQSVFMNEPRLSDFKQVLLREGIQAEFVGGVLVCNNQVAVRRTETGRIGLEGCLCQDFYRIRDLLYEQYAIV

SEQ ID NO: 389 - DNA, 4925 bp, Homo sapiens
  CDS (135)..(3578)
accgcgcgccactgtcttcgccttcttgcacttcgcgggagaagttgttggcgcgaatggatcctgagcctcgataacagattcctcaaccggcccacccgccagccagccagcgccttcatcctggggctgcgatggacattcggaaattctttggagtaataccaagtggaaagaaacttgtaagtgaaacagtaaagaagaatgagaaaacaaagtctgatgaagaaactttaaaagcaaagaaaggaataaaggaaatcaaggtaaatagctcccgtaaagaggatgacttcaaacaaaagcaaccaagcaagaaaaagaggatcatctatgattcagattcagagtcagaggagacgttgcaggtaaaaaatgccaaaaagccaccagaaaaactgccagtatcttctaaacctggtaaaatttcacggcaggatcctgttacatacatttcagaaacagatgaagaagatgactttatgtgtaagaaggcggcctctaaatcaaaagagaatggaagatctacaaatagtcatcttggaacatcaaacatgaaaaagaatgaagaaaacactaagaccaagaataagcctttatcaccaataaaacttacacccacatcagtacttgattattttggaactggaagtgtccaaagatctaataagaagatggtggcaagcaaaagaaaagagctttcacaaaatacagatgagtctggattaaatgatgaagccatcgccaagcaattacagcttgatgaagatgcggagctggagaggcagttgcatgaagatgaagagtttgccagaacattagccatgttggatgaagaacccaagaccaaaaaggctcgaaaggacacagaagcgggagaaacgttttcatctgtccaagccaatttaagtaaagcagaaaaacataaatatcctcataaagtaaaaacagcacaagtttcagatgaaagaaagagctacagtcctaggaagcaaagtaaatatgaaagttcaaaagaatctcagcaacattccaagtcatcagctgacaaaataggagaagtctcttctcccaaggccagttctaagctggcaattatgaaaagaaaagaagagagctcttataaagaaatagagcctgtggcctcaaaaagaaaagaaaatgccattaaattgaaaggagagacaaaaactcctaagaaaaccaaaagttctccagctaaaaaagagtctgtaagtcctgaagattctgaaaagaaacgcactaattatcaagcttatcgaagctacttaaatcgagaaggtcccaaggctctgggctccaaagaaataccaaagggagctgaaaattgcttggaaggccttatatttgtaatcacaggcgtgctggagtctattgaacgagatgaggccaagtctctaattgaacgttatgggggaaaagtaacaggaaatgtcagcaagaaaacaaattatcttgtcatgggtcgtgatagtggacagtccaagagtgataaggccgcagccttggggacaaaaattattgatgaagatggcctgttgaatctgattcggactatgccaggcaagaaatccaagtatgaaatagcagttgaaactgagatgaagaaagagtccaaactggagagaacaccccaaaaaaatgtccaaggaaaaagaaaaattagtccatctaaaaaggaatcagaatctaaaaagagcaggccgacttccaaaagggacagtttggcaaagacaataaaaaaggaaacagatgtgttttggaaaagcctggatttcaaggagcaggtggctgaggagacaagtggtgacagcaaggctaggaatttggctgatgacagcagtgaaaacaaagtggaaaatttgctctgggtggataaatataagccaacctcgctcaagaccataattggacagcaaggtgaccagagctgtgccaacaaactcctacgctggctccgaaactggcaaaagagttcttccgaagataaaaaacacgcaaagtttggtaaattttccggcaaagatgatggctctagttttaaagcagcgttgctgtcaggccctcctggtgttggcaaaaccaccacagcttccctggtgtgtcaggagttgggatacagctacgtggaactgaatgcaagtgacacccggagtaagagcagtttgaaggcgattgttgctgagtcactgaacaataccagcatcaaaggcttttattcaaatggagcagcctcttcagtaagcacgaaacatgctctcatcatggatgaagtagatggcatggcaggcaatgaggataggggaggaattcaggaattaattggcctgataaaacatactaaaattcccattatttgtatgtgcaatgatagaaatcatcccaagattcgctctctggttcattattgttttgatcttcgttttcaaagacctcgggttgaacagattaagggtgctatgatgtctattgcatttaaagaaggtttaaagattccccctccagctatgaatgaaataattttgggagccaatcaagatatcagacaggttttacataatctgagtatgtggtgtgcacgaagtaaagcattaacctatgaccaggccaaagctgattctcacagagccaaaaaggatatcaaaatgggcccatttgatgttgcccggaaagtgtttgcagctggagaggagactgctcacatgtcacttgtggacaagtcagatctcttttttcatgattattcaatagcacccctcttcgtccaggaaaattacatacacgtgaagcctgtagcagcagggggtgacatgaaaaagcacctgatgcttttaagcagagcagcagacagcatatgcgatggtgacctagtggacagccagatccggagtaagcaaaactggagtcttctgcctgcgcaggccatttatgccagtgttcttcctggagagttgatgagggggtacatgacccagtttcccaccttcccaagctggctggggaagcactcgtctacaggcaaacatgatcgtattgttcaggacctggccttgcatatgagtctcagaacttactccagcaaaaggactgtaaacatggattatctgtcgcttctaagggatgcacttgtacagcccttgacctcacaaggagtagacggagtacaggatgttgttgcacttatggacacatattatttgatgaaagaagactttgagaatatcatggaaatcagcagctggggtggcaaacctagtcccttttcaaagctggatcccaaggtgaaagcagccttcacaagagcttacaataaggaagcccaccttactccatactcacttcaagctataaaggcatctagacacagcacaagcccatccctggattcggaatacaatgaagaattaaatgaagatgactctcaatctgatgagaaagaccaagatgctatagaaactgatgccatgatcaagaaaaagacaaaatcttcaaagccttcaaaaccagaaaaagataaggagcccagaaaaggaaaaggaaaaagttcgaagaaatgaaaccatttttcactagcgacagccactttttactctccctcctgaccagtccagctggtctagagaaagccttgttttttcccagagcaaccatgttttagcataatgggatgacctggtgtcccattataaataaagggtggtatggctagaagggtatgagcagtaggcttatgtacacctcttatagaggttgataggactgcttgggtcctccactgtcctctgtcaatctagttagacgtgcttctgaatgactgtagaattggaactagaaactacacctgggctttggagtcagattttagttaacaataatgagcctgggagcagtagtactaaggcgtcttttgtaggcttaagaatttatcctaatggcctttataggaccaatgctgattttttttaaaggcagttcctattatgtggtgaaattttgtaaataaatgattatacaaaacagtcaccacctagaactgggtattctttgtacattgtcagatatctttcaaagtataaattaggaataaaaatgttccacatgatatgtgtacaaattctttttaagattgtcatcttgtacagcaaaatattatgttggtatattacttccttattaatttgcaaatgattggattaaaaaagctcactgtattccttactaacctgttgtgtgaaacataacattggcagtcgaggagtcagaactcggattcccagcctcactccctctgtgtgtgttgaccacgtctctgctgtgaataggatttcatgcagtggtctgttatggggctttgcagcgtggggggctgcagaagattctcagacattcttatccttctggagtctcaacccatcaggttcagaccagtaggaaccaggctgggtcaggctcttaatttcactatggtgggggacaaaatgaacactggcttttgttcactttgcccctgagagatctagtcctgtcctgtgatggcttccacaaaccctgttggaagtttgggttattcctataactgtatgtgttgagtggccgtgaggctatggacctagcctggaatttagatgtctagctattttttaatcttgttggtaaatgctcagaggtctgtgctacctctgtgaggtatatactaaaatgaatgtaaaataaggatcgtattccctgctttaaggaactggtagtcttgtttgggtgatgagacaaagttcttgagacatttaaactgtatttaccagtgtgaaaaatgtcatttatggagattaattcattatggaaataaaacattgcctaagcccttgaaaaaaaaaaaaaaaaaaaaaaaaaaaaaaaaaaaaaaaaaa

SEQ ID NO: 390 - protein, 1147 aa, Homo sapiens
MDIRKFFGVIPSGKKLVSETVKKNEKTKSDEETLKAKKGIKEIKVNSSRKEDDFKQKQPSKKKRIIYDSDSESEETLQVKNAKKPPEKLPVSSKPGKISRQDPVTYISETDEEDDFMCKKAASKSKENGRSTNSHLGTSNMKKNEENTKTKNKPLSPIKLTPTSVLDYFGTGSVQRSNKKMVASKRKELSQNTDESGLNDEAIAKQLQLDEDAELERQLHEDEEFARTLAMLDEEPKTKKARKDTEAGETFSSVQANLSKAEKHKYPHKVKTAQVSDERKSYSPRKQSKYESSKESQQHSKSSADKIGEVSSPKASSKLAIMKRKEESSYKEIEPVASKRKENAIKLKGETKTPKKTKSSPAKKESVSPEDSEKKRTNYQAYRSYLNREGPKALGSKEIPKGAENCLEGLIFVITGVLESIERDEAKSLIERYGGKVTGNVSKKTNYLVMGRDSGQSKSDKAAALGTKIIDEDGLLNLIRTMPGKKSKYEIAVETEMKKESKLERTPQKNVQGKRKISPSKKESESKKSRPTSKRDSLAKTIKKETDVFWKSLDFKEQVAEETSGDSKARNLADDSSENKVENLLWVDKYKPTSLKTIIGQQGDQSCANKLLRWLRNWQKSSSEDKKHAKFGKFSGKDDGSSFKAALLSGPPGVGKTTTASLVCQELGYSYVELNASDTRSKSSLKAIVAESLNNTSIKGFYSNGAASSVSTKHALIMDEVDGMAGNEDRGGIQELIGLIKHTKIPIICMCNDRNHPKIRSLVHYCFDLRFQRPRVEQIKGAMMSIAFKEGLKIPPPAMNEIILGANQDIRQVLHNLSMWCARSKALTYDQAKADSHRAKKDIKMGPFDVARKVFAAGEETAHMSLVDKSDLFFHDYSIAPLFVQENYIHVKPVAAGGDMKKHLMLLSRAADSICDGDLVDSQIRSKQNWSLLPAQAIYASVLPGELMRGYMTQFPTFPSWLGKHSSTGKHDRIVQDLALHMSLRTYSSKRTVNMDYLSLLRDALVQPLTSQGVDGVQDVVALMDTYYLMKEDFENIMEISSWGGKPSPFSKLDPKVKAAFTRAYNKEAHLTPYSLQAIKASRHSTSPSLDSEYNEELNEDDSQSDEKDQDAIETDAMIKKKTKSSKPSKPEKDKEPRKGKGKSSKK

SEQ ID NO: 391 - DNA, 2653 bp, Homo sapiens
  CDS (101)..(2233)
atgttgtgatggagaagccgcggcggagcccgaaccccgcagcctgagccacctccgtcatctgggcccggggcctcaccgcgcaggagctgccaaggccatgtctgttccatcatcactgagccagtcggccattaatgccaacagccacggaggccccgcactgagcctacccctgcctctgcacgctgcccacaaccagctgctcaacgccaagctgcaggccacagctgtgggacccaaggacctgcgcagcgccatgggggagggtggtgggcctgagccaggccctgccaatgccaagtggctaaaagagggccagaaccagctccggcgggccgccacggcccaccgtgaccagaatcgcaatgtgaccttgaccttggcggaggaggccagccaggagcctgagatggcacccttgggccccaaaggcctgatacacctgtactctgagctggagctctcagctcacaacgcagccaaccgaggcctacgaggacctggcctgatcatcagcactcaagagcaggggccagatgagggagaggagaaggcggccggggaggccgaggaggaggaggaggatgatgatgatgaagaggaggaggaggacttatcttctcccccagggctgcctgagcccctggagagtgtggaggcccctcccaggccccaagcccttacagatggcccccgggaacacagcaagagtgccagcctcctgtttggcatgcggaacagtgcagccagtgatgaggactcaagctgggctaccttatcccagggcagcccctcctatggctccccagaggacacagattccttctggaaccccaacgccttcgagacggattccgacctgccggctggatggatgagggtccaggacacctcagggacctattactggcacatcccaacagggaccacccagtgggaaccccccggccgggcctccccctcacaggggagcagcccccaagaggagtcccagctcacctggacaggttttgctcatggagaaggctttgaggatggagaattttggaaggatgaacccagtgatgaggccccaatggagctgggactgaaggaacctgaggaggggacgttgaccttcccagctcagagcctcagcccagagccgttgccccaagaggaggagaagcttcccccacggaataccaacccagggatcaagtgtttcgccgtgcgctccctaggctgggtagagatgaccgaggaggagctggcccctggacgcagcagtgtggcagtcaacaattgcatccgtcagctctcttaccacaaaaacaacctgcatgaccccatgtctgggggctggggggaaggaaaggatctgctactgcagctggaggatgagacactaaagctagtggagccacagagccaggcactgctgcacgcccaacccatcatcagcatccgcgtgtggggcgtcgggcgggacagtggaagagagagggactttgcctacgtagctcgtgataagctgacccagatgctcaagtgccacgtgtttcgctgtgaggcacctgccaagaacatcgccaccagcctgcatgagatctgctctaagatcatggccgaacggcgtaatgcccgctgcttggtaaatggactctccctggaccactctaaacttgtggatgtccctttccaagtggaattcccagcgcctaagaatgagttggtccagaagttccaagtctattacctggggaatgtacctgttgctaaacctgttggggtagatgtgattaatggggccctcgagtcagtcctgtcctccagcagccgtgaacaatggaccccaagtcatgtcagtgtggcccctgctaccctcaccatcttgcaccagcagacagaggcagtgctgggagagtgtcgggtgcgtttcctctccttcctggccgtgggcagagatgtccacacgtttgcattcatcatggctgccggcccagcctccttctgctgccacatgttctggtgcgagcccaatgctgccagcctctcagaggctgtgcaggctgcgtgcatgcttcgctaccagaagtgtctggatgcccgttcccaggcctccacctcctgcctcccagcaccccctgctgagtctgtggcacggcgtgtagggtggactgtccgcaggggtgttcagtcgctgtggggctccctgaagcccaaacggctgggggcccataccccatgaagaagcccccaccttccctccacctgcttgtgttgggccccagggaactaaagggtgtgggtcagggaggggtctagaggctattcctaggcctcaggcctcccaaatatgcccctccccagtagctacggttccctgcctaggagctggggagggagagatctaatcccttcaaggaagtgataacactggagtggtaacaagaggagcaggaagcaaggccagccctggttctccatccccatgtgtttcaggtggaacaggaggaactggtccaggccaggcctcatcctcctggacccagcaggggcagaaggaggaagggactggtccaggcatgggtcccttccccctgctccatgggcacctctgctgtattgatatcactaataaagtctgtctgcactgcaaaaaaaaaaa

SEQ ID NO: 392 - protein, 710 aa, Homo sapiens
MSVPSSLSQSAINANSHGGPALSLPLPLHAAHNQLLNAKLQATAVGPKDLRSAMGEGGGPEPGPANAKWLKEGQNQLRRAATAHRDQNRNVTLTLAEEASQEPEMAPLGPKGLIHLYSELELSAHNAANRGLRGPGLIISTQEQGPDEGEEKAAGEAEEEEEDDDDEEEEEDLSSPPGLPEPLESVEAPPRPQALTDGPREHSKSASLLFGMRNSAASDEDSSWATLSQGSPSYGSPEDTDSFWNPNAFETDSDLPAGWMRVQDTSGTYYWHIPTGTTQWEPPGRASPSQGSSPQEESQLTWTGFAHGEGFEDGEFWKDEPSDEAPMELGLKEPEEGTLTFPAQSLSPEPLPQEEEKLPPRNTNPGIKCFAVRSLGWVEMTEEELAPGRSSVAVNNCIRQLSYHKNNLHDPMSGGWGEGKDLLLQLEDETLKLVEPQSQALLHAQPIISIRVWGVGRDSGRERDFAYVARDKLTQMLKCHVFRCEAPAKNIATSLHEICSKIMAERRNARCLVNGLSLDHSKLVDVPFQVEFPAPKNELVQKFQVYYLGNVPVAKPVGVDVINGALESVLSSSSREQWTPSHVSVAPATLTILHQQTEAVLGECRVRFLSFLAVGRDVHTFAFIMAAGPASFCCHMFWCEPNAASLSEAVQAACMLRYQKCLDARSQASTSCLPAPPAESVARRVGWTVRRGVQSLWGSLKPKRLGAHTP

SEQ ID NO: 393 - DNA, 2907 bp, Homo sapiens
  CDS (84)..(2123)
cagactgtggagccgggagccggcagtaagcccagaggtctccaccccacgggaggaaggctgaggccaagaccccggaagagatggaccgcgtgaccagataccccatcctgggcatccctcaggcacaccgtggcaccggcctggtgctggatggagacaccagctacacataccatctggtgtgcatgggccccgaggccagcggctggggccaggatgagccgcagacatggcccactgaccacagggcccagcagggcgtgcagaggcagggggtgtcctacagcgtgcatgcctacactggccagccgtccccacgggggctccactcggagaacagggaggatgagggttggcaggtttaccgcctgggcgccagggatgcccaccagggacgtccaacatgggcactccgcccagaggacggggaggacaaggagatgaagacctaccgcctggatgctggggacgctgaccccaggaggctgtgtgacctggagcgggagcgctgggccgtcatccagggccaggcagtcaggaagagcagcaccgtggccacgctccagggcactcctgaccacggagaccccaggacccccggcccacctcggtccacgcccctggaggagaacgtggttgacagggagcagattgacttcctggcagcgagacagcagttcctgagtctggagcaggcgaacaagggggcccctcatagctccccggccagggggacccctgcaggcacaaccccaggggccagccaggcccccaaggccttcaacaagccccacctggccaacgggcacgtggttcccatcaagccccaggtgaagggggtggtcagggaagagaacaaggtgcgtgctgtgcccacctgggccagtgtccaagttgtggatgaccctggctccttggcctcagtggagtccccggggacccccaaggagacgcccatcgagcgggagatccgtctggctcaggagcgtgaggcagacctgcgagagcagagggggcttcggcaggcaaccgaccaccaggagctggtggaaatccccaccaggccgctgctgaccaagctgagcctgatcacagccccacggcgggagagagggcgcccgtccctctacgtgcagcgggacatagtacaggagacacagcgtgaggaagaccaccggcgggagggcctgcacgtgggccgggcgtccacacccgactgggtctcggagggtccccagcccggactccggagagccctcagctcagattccatcctcagcccggccccagatgcccgtgcggccgacccagctccagaagtgaggaaggtgaaccgcatcccacctgatgcctaccagccgtacctgagccccgggaccccccagctagaattctcagccttcggagcattcggcaagcccagcagtctctccacagcggaggccaaggctgcgacttcaccaaaggccacgatgtccccgaggcatctctcagaatcctctggaaaacccctgagcacaaagcaagaggcatcgaagccccctcggggatgcccgcaagccaacaggggtgtcgtgcggtgggagtacttccgcctgcgtcctctgcggttcagggccccagacgagccccagcaggcccaagtcccccatgtctggggctgggaggtggctggggcccctgcactgaggctgcagaagtcccagtcatctgatctgctggaaagggagagggagagtgtcctgcgccgggagcaagaggtggcagaggagcggagaaatgctctcttcccagaggtcttctccccaacgccagatgagaactctgaccagaactccaggagctcctcccaggcatccggcatcacgggcagttactcggtgtctgagtctcccttcttcagccccatccacctacactcaaacgtggcgtggacagtggaagatccagtggacagtgctcctcccgggcagagaaagaaggagcaatggtacgctggcatcaacccctcggacggtatcaactcagaggtcctggaagccatacgggtgacccgtcacaagaacgccatggcagagcgctgggaatcccgcatctacgccagtgaggaggatgactgagcctcgggatggggcgcccaccccctgccctgccctgaccctcgtgggaactgccaagaccatcgccaagcccccaccctaggaaatgggtcctaggtccaggatccaagaaccacagctcatctgccaacaatcccaccatgggcacatttgggactgttgggtttttcgtttccgtttctatcttcctttagaaatgtttctgcctttggggtctaaagcttttggggatgaaatgggacccctgctgattctttctgcttctaagactttgccaaatgccctgggtctaagaaagaaagagacccgctcctccactttcaggtgtaatttgcttccgctagtctgagggcagagggaccggtcaaagagggtggcacagatcgcagcaccttgaggggctgcgggtctgagggaggagacactcagctcctccctctgagaagtcccaagctgagaggggagacctgcccctttccaaccctgggaaaccatccagtctgagggaggaggccaaactcccagtgctgggggtccctgtgcagccctcaaacccttcaccttggtgcacccagccacacctggtggacacaaagctctcacatcgataggatcccatgaggatggtccccttcacctgggagaaaagtgacccagtttaggagctggaggggggtctttgtcccccacccccaaactgccctgaaataaacctggagtgagctgccaaaaaaaaaaaaaaaaaaaaaaaaaaaaaaaaaaaaaaaaaaaaaaaaaaaaaaaa

SEQ ID NO: 394 - protein, 679 aa, Homo sapiens
MDRVTRYPILGIPQAHRGTGLVLDGDTSYTYHLVCMGPEASGWGQDEPQTWPTDHRAQQGVQRQGVSYSVHAYTGQPSPRGLHSENREDEGWQVYRLGARDAHQGRPTWALRPEDGEDKEMKTYRLDAGDADPRRLCDLERERWAVIQGQAVRKSSTVATLQGTPDHGDPRTPGPPRSTPLEENVVDREQIDFLAARQQFLSLEQANKGAPHSSPARGTPAGTTPGASQAPKAFNKPHLANGHVVPIKPQVKGVVREENKVRAVPTWASVQVVDDPGSLASVESPGTPKETPIEREIRLAQEREADLREQRGLRQATDHQELVEIPTRPLLTKLSLITAPRRERGRPSLYVQRDIVQETQREEDHRREGLHVGRASTPDWVSEGPQPGLRRALSSDSILSPAPDARAADPAPEVRKVNRIPPDAYQPYLSPGTPQLEFSAFGAFGKPSSLSTAEAKAATSPKATMSPRHLSESSGKPLSTKQEASKPPRGCPQANRGVVRWEYFRLRPLRFRAPDEPQQAQVPHVWGWEVAGAPALRLQKSQSSDLLERERESVLRREQEVAEERRNALFPEVFSPTPDENSDQNSRSSSQASGITGSYSVSESPFFSPIHLHSNVAWTVEDPVDSAPPGQRKKEQWYAGINPSDGINSEVLEAIRVTRHKNAMAERWESRIYASEEDD

SEQ ID NO: 395 - DNA, 6629 bp, Homo sapiens
  CDS (314)..(2506)
gctgcggccgcggctgagggacctgcccgcgctgctgcggagcgggctcacgctgcggaggaagcggagcgccgctgggggccggactctatcaagaagaatatctaatccgtaccttgaacatacgccttcccagatttatggagagaattcttcttgtgcaggaagagcattgaggaatattattatcgttcaagcagctgacctgataaaggacagagtgaacctcaaggggttttacaggaggagctgcgttgggtcagagctggtagactggcttctagaacactgtcctttcgtccagtgcagatctatggccataggagtctggcaactcctactggacatgggaattatgttatcagtggaccagcatctatactttcaagatacttatgttttctaccagttttcctctgatgaatgtagctacttgtactgtgaatttgaaagagaagaagaatggcaaaatggtgtcaagcttttactgcaacttgtgcctctcattcctgccagaggtggcatctgtgaactgtctcatcagaaaattgaagactccgaagaaagcagtgatgaaattcttgtgcgtctaacatctgcggtgcagagagagctagcagctgttattgctttgaaagcaaggaagtctgcaattgaacaagatgaagaaaacaacgacaaacatgtagctgtaacagaagccgaaagtgttccagattctcaggcaggggtgatgtgcaagctccaggaaagagatgaaatcggacgaattgaactagtccagaagctggcaaaagaaaactatcagtttttgcagacggacaaaaaagaacaggagaagtctgaacaccaagatgatgaagtgacgactgttcaggttaaagagcaagaccagagcgtcctggtgctgaagaaagtgcagtgctgtggcccagcccccacagctgggagtgcggagagccattggagatatgtggtggtgtccgggaccccggagaagattttggagcaccttttgaatgacttgcacctggaagaagtccaggacaaagaaacagagaccctcctggatgacttccttctcacgtacactgtcttcatgacaactgatgacttgtgccaggctctgttaaggcactattctgctaagaagtatcaaggcaaagaggaaaactcagacgttccgcgtaggaaacgtaaagtcttgcatcttgtttcccagtggattgctctgtacaaagactggttacctgaagatgaacattcaaaaatgtttttaaagaccatatataggaatgtactggatgatgtttatgaatatccaatacttgaaaaagaattgaaagaatttcaaaagatacttggaatgcaccgtcgtcacactgtagatgaatattcaccacaaaaaaagaataaagcccttttccaccaattcagtcttaaggagaactggctccagcatagaggaactgtgactgaaacggaggaaattttctgccacgtgtatataacagagcactcctatgtcagtgtgaaggcaaaagtttccagtatagcccaagagatcctaaaagtcgtggcagaaaagatccagtatgcagaagaggatctggctctggtggccatcacattctctggggaaaagcatgaacttcagccaaatgacttagtcatctccaaatccctcgaggcatctggtcgaatatatgtctaccggaaagacctggcggacactttgaacccatttgcagaaaatgaggaatcacagcaaaggtcgatgaggattttgggaatgaacacttgggatcttgctctggaattaatgaattttgattggagtctattcaattcaattcacgagcaagagctgatctacttcacgttcagcagacagggaagtggggaacacactgcaaatctcagccttctgctccagagatgcaatgaggtccagctttgggtggccacggagattctgctctgcagccagctgggcaagcgagtgcagctggtgaaaaaattcatcaaaattgcggctcactgcaaagcccagagaaacctgaattctttctttgccattgtgatgggtctcaacactgcttctgtcagtcgactgtcgcagacctgggagaaaatccctgggaagtttaagaaacttttctctgaacttgaaagtttaacagatccttccctaaatcacaaagcctacagagatgcattcaaaaagatgaagccaccaaaaatccctttcatgcccttattgcttaaagatgtaacatttattcatgaaggaaataaaacttttttggataatcttgtcaattttgaaaagctgcatatgatcgcagacactgtccgaaccctgagacactgcaggactaaccagtttggtgacctgtctccaaaagagcatcaagagttaaagtcctatgttaatcacctgtatgtcattgacagccagcaggctctgtttgagctctcacacaggatcgagcctcgggtgtgagccccactgcctcacctcccctgtatctgcagcactttgagctacgggaatgtctatgccaagcacgttgctttcctgtgagaaaagaagttgctgagttttatcagtataacccaagacattcacaggaaagccagccaaagcgtgttcaggaagtgatgtcagccaccagagagggggagaggtttctccatgctactctcgggacaagaaggcagaaggagagtcagaagcattcttgagatggagaaggctggtttcttatgatcacattgttgatccagtccagttttcaatatgagatgtgccagcatcaagacaagacaacgtcttgacatgcaatgaccaaatatttcattaagagcgtgcatgaaacaggaaggagtttttactttgcctagttttagattactgtccataagctgtcaaagaagtcattcttttgaacacctgatgacagagacagcatctctagatctccagggaggagaggtttctgttgatacaacctgtgacatcaccaaaagccacttgtgtctagggagttagtgaggactgcagctagcatccatgctctgatgggcagatgaacaatgtcaaggtgtgcatcactttgcaccacaatcaactattgacacatgcttgcaggtgaaattagtttctgtacaactgatttgcagctataggcaaggtagatgaagttgctttgccagtaaggaaaaatagtaatctttaagaaattgactcattgtttaatttctggggattttctttatacttctaagcaggctcttatcttttattggacataatatgattttgaaaaagcacagtgcctgacacattgcaaacactcaccaactgcttgctgaggtgacagagtcacaaaagtctgcattcttgtgcctgatgatgcattttgcgtacctcatacaggctccttgcccacactatggaatgacagcagccagtgcagggaggttaagtgacatttaatgagtgaagcacttagcactctctaggtaataagatagtggtaattactagtgttttggcaaatgaaaaatgccctgaaatagccaaatgtctgattaatgttggcaacttagaagtcctataatccaactaccagccaaagcagggagcctttctataatttgcctttttttttttttttttcaaaatctgagtcttctaaaatcttattattcccatttttaccaattgaggctcctgtagcaaataagacctcttgatattttcaaggactggttagaggatttctttcaaccttcacatgaacaaaacagcctatgggtcaaaataatgaaatccacccctgcctgctagatacttgtcaccttgctaaaatgcaagggcctggtccattcattttccaaatgcaggagtcttggtgcacttctcactcttcctgcctgttcatctctttcatgcccacacagacctgtttcctttttgtctcatcaacgcctcattcatcctcattactgaggcgtgtccaatgctttttgacatctttatagcagtgctgtttcctgggctcaggaaccacactgagcttgagatactgctggaaggaaccatgtggagagaaggtttgggagaactttgagagagacttagtttggcccagcatgtaaaacttcagtcctgaacatttatagggttttatagaagggcatcctccagggctggtccattcagagaaatgctgcatgctgccgtcatggaatgtggcccacaggacaccagagccgtgagaaccggagagcagacttccctcacggctgggctgagcaaaccctccaaagccctcctcacgcagttactaacaatagcatgggcttacagcacaagcacgtgttctcacctttttcctatgccctggactaaggtttggccagtgtaatcatataaggccatcctgacattgtttctgtgtttcaaaatttggatttttatttacattagaactacattgctcctagtagaacattacctttaggggactaattttccatggagaactatttcagcatattgcatgctgctcagaccccaagtcagatatgcccaccaagccagatgaagctacacaaatgtggtatttaaatgcattttgtacagtgacttcagagtatctcacatgacatgggtgtaaactggctggggagaaaatgatgcttgttcacctcttcctccagccgtggttaggtggtcctaggggtagcagagggaagggaggattttgtgcagtcaagatttgcttttccatccttgtcttctgaatgtctaaaatctctgcatctttctgaagtttaacaactgtctccagaggtttgccaggcagcagctctcagaagtttccaaagctttgcagaatcttagatctggaattaaagaattcaagcccgaattgtgagaaccagatattactcaacagaaagctctttctaaggaatctgagctgttcactggtggacagtggtggggcttgagtgctccttgttaataggatgggccatgcaccctctctggatattcaccaaggcctcttcagaatagggtttgttctggctagaagcgtggtctagaagatggctaagctctttgccagctctcatttggagttttattattgcataaaatcttcgctcactctgcaaatcttacgtaatctggcaccttcggcaccaggtggtgcaggggcacttctaagtgggctctttttgttacagcacaactctcagacagtcctgtgggtctttggattcgtcagcattccagcaaactagccctgcttagaagttagcacaagacagcagaatgcaggaccccgtaggcaaaatcacaaccttgctattaaaaaaaattttgttttacatacacatttgcaggtgttccctagagtgtggtgttttgaatttgctctttgtcatctgtataattgccaaatgattatagtgatacacatgacctgcattcacttttttctagtttccttaattatgtttagaataaattcatttccctagaccgagaaccacaaacaggtagtgtggagcatacaccgaatttagaagcatgtggataaggtcagtgctcacactgcctagtccacagggagaggatgctgcatgaatatatacttgcctctgagtggaggagaaatcgtggcatgaaagagagagtaccagtgatgacttcttatccctggagctgggctttcactgctacccatatcccagccctgcgagtctgttctagccagcacagacaccgcagatccggaactgaatgttcctaaatggcgcagccaatccaggcttttcagaaactgggcaaaaacattaaaatggggacgatcgggtcttccgcagtggtccaacacaggatttcttttaaatgtttcaaaaacatgtccttaaaatttcagcctgcttcttagcgagtgggccagttttgcttaaaactggtgggggggcgggggggaagtttttaaaaattgccaaaaagttagatgcaaatgtattactgtataaagcaaagctgtatatactaaacattttttagcagagtaatatttatttgcatagtctatttattgtattcgtatcacactgttattaaatactgggatgaaatcagtgacctgaagcaagaaatcttgccttttaatgtatcattaattagggctgctgtgatattgtcagcttgcattaacaattagaagatagagaacccgccatcagggtgtctacctaacttctcagggactacacttggtagttttccaccatttaaagaactggtaaatatgaaacatttgttgagttaccagaattgccattaacagtgttttctttcccatattccatgctttctgcctctgtgtatatatataatatatatgtatatgactgtgctgtgtatttatcgaagctagtaagcaataatttatatgtaaaaatggccaagcaatataaggttaaaacttatataagtaacccttaccttatcttgtattttcaatttttttttaaaactgcttttccaaatatgagactatgttaaagacactattcatgcctcttaaaaaaaa

SEQ ID NO: 396 - protein, 730 aa, Homo sapiens
MAIGVWQLLLDMGIMLSVDQHLYFQDTYVFYQFSSDECSYLYCEFEREEEWQNGVKLLLQLVPLIPARGGICELSHQKIEDSEESSDEILVRLTSAVQRELAAVIALKARKSAIEQDEENNDKHVAVTEAESVPDSQAGVMCKLQERDEIGRIELVQKLAKENYQFLQTDKKEQEKSEHQDDEVTTVQVKEQDQSVLVLKKVQCCGPAPTAGSAESHWRYVVVSGTPEKILEHLLNDLHLEEVQDKETETLLDDFLLTYTVFMTTDDLCQALLRHYSAKKYQGKEENSDVPRRKRKVLHLVSQWIALYKDWLPEDEHSKMFLKTIYRNVLDDVYEYPILEKELKEFQKILGMHRRHTVDEYSPQKKNKALFHQFSLKENWLQHRGTVTETEEIFCHVYITEHSYVSVKAKVSSIAQEILKVVAEKIQYAEEDLALVAITFSGEKHELQPNDLVISKSLEASGRIYVYRKDLADTLNPFAENEESQQRSMRILGMNTWDLALELMNFDWSLFNSIHEQELIYFTFSRQGSGEHTANLSLLLQRCNEVQLWVATEILLCSQLGKRVQLVKKFIKIAAHCKAQRNLNSFFAIVMGLNTASVSRLSQTWEKIPGKFKKLFSELESLTDPSLNHKAYRDAFKKMKPPKIPFMPLLLKDVTFIHEGNKTFLDNLVNFEKLHMIADTVRTLRHCRTNQFGDLSPKEHQELKSYVNHLYVIDSQQALFELSHRIEPRV

SEQ ID NO: 397 - DNA, 1212 bp, Homo sapiens
  CDS (95)..(613)
ggagtccagacccgacggccggcccagttccacgcacccagcgagcccaagcgccttctccgcaccagggaagccccacccaccagaagccaagatgtccagcaagcgggccaaagccaagaccaccaagaagcggccacagcgggccacatccaatgtcttcgcaatgtttgaccagtcccagatccaggagtttaaggaggctttcaacatgattgaccagaaccgtgatggcttcattgacaaggaggacctgcacgacatgctggcctcgctggggaagaaccccacagacgaatacctggagggcatgatgagcgaggccccggggcccatcaacttcaccatgttcctcaccatgtttggggagaagctgaacggcacggaccccgaggatgtgattcgcaacgcctttgcctgcttcgacgaggaagcctcaggtttcatccatgaggaccacctccgggagctgctcaccaccatgggtgaccgcttcacagatgaggaagtggacgagatgtaccgggaggcacccattgataagaaaggcaacttcaactacgtggagttcacccgcatcctcaaacatggcgccaaggataaagacgactaggccaccccagccccctgacaccccagcccccgccagtcacccctccccgcacacacccgtccataccagctccctgcccatgaccctcgctcagggatccccctttgaggggttagggtcccagttcccagtggaagaaacaggccaggagaagtgcgtgccgagctgaggcagatgttcccacagtgaccccagagccctgggctatagtctctgacccctccaaggaaagaccaccttctggggacatgggctggagggcaggacctagaggcaccaagggaaggccccattccggggctgttccccgaggaggaagggaaggggctctgtgtgccccccaggaggaagaggccctgagtcctgggatcagacaccccttcacgtgtatccccacacaaatgcaagctcaccaaggtcccctctcagtccccttccctacaccctgaccggccactgccgcacacccacccagagcacgccacccgccatgggagtgtgctcaggagtcgcgggcagcgtggacatctgtcccagagggggcagaatctccaatagaggactgagcactgctaaaaaaaaaaaaaaaaaaaaaaaaa

SEQ ID NO: 398 - protein, 172 aa, Homo sapiens
MSSKRAKAKTTKKRPQRATSNVFAMFDQSQIQEFKEAFNMIDQNRDGFIDKEDLHDMLASLGKNPTDEYLEGMMSEAPGPINFTMFLTMFGEKLNGTDPEDVIRNAFACFDEEASGFIHEDHLRELLTTMGDRFTDEEVDEMYREAPIDKKGNFNYVEFTRILKHGAKDKDD

SEQ ID NO: 399 - DNA, 8189 bp, Homo sapiens
  CDS (84)..(2453)
gcggcggcggccaaactccgcggcgtccccagggcgccagcttcgccctcgccgccgcggccgcgctgctcttcggctccgacatggaagatggaccttctaataatgcgagctgcttccgaaggctgaccgagtgcttcctgagccccagtttgacagatgaaaaagtgaaggcatatctttctcttcacccccaggtattagatgaatttgtatctgaaagtgttagtgcagagacagtagagaaatggctgaagaggaagaacaacaaatcagaagatgaatcagctcctaaggaagtcagcaggtaccaagatacgaatatgcagggagttgtatatgaactaaacagctatatagaacaacggttggacacaggaggagacaaccagctactcctctatgaactgagcagcatcattaaaatagccacaaaagccgatggatttgcactgtatttccttggagagtgcaataatagcctgtgtatattcacgccacctgggataaaggaaggaaaaccccgcctcatccctgctgggcccatcactcagggcaccaccgtctctgcttatgtggccaagtccaggaaaacactgctagtagaagacatccttggagatgaacgatttccaagaggtactggactggaatcagggactcgtatccagtctgttctttgcttaccaattgtcactgcaattggtgacttgattggtattctcgagctgtatcggcactggggcaaagaagccttctgtcttagtcaccaggaggttgcaacagcaaatcttgcctgggcttcagtagcaatacatcaggtgcaggtatgcagaggccttgccaaacagacagaattgaatgacttcctactcgacgtatcaaaaacatattttgataacatagttgcaatagattctctacttgaacacataatgatatatgcaaaaaacctggtgaatgccgatcgttgtgcgcttttccaggtggaccataagaacaaggagttatattcagacctttttgatattggagaggaaaaggaaggaaaacctgtcttcaagaagaccaaagagataagattttcaattgagaaaggaattgctggccaagtagcaagaacaggggaagtcctgaacattccagatgcctatgcagacccacgctttaacagagaagtagacttgtacacaggctacaccacgcggaacatcctgtgcatgcccatcgtcagccgaggcagcgtgataggtgtggtgcagatggtcaacaaaatcagtggcagtgccttctctaaaacagatgaaaacaacttcaaaatgtttgccgtcttttgtgctttagccttacactgtgctaatatgtatcatagaattcgccactcagagtgcatttaccgggtaacgatggaaaagctgtcctaccatagcatttgtacttcagaagagtggcaaggtctcatgcaattcacccttcccgtgcgtctctgcaaagaaattgaattattccactttgacattggtccttttgaaaacatgtggcctggaatttttgtctacatggttcatcggtcctgtgggacatcctgctttgagcttgaaaagttgtgtcgttttattatgtctgtgaagaagaactatcggcgggttccttatcacaactggaagcatgcggtcactgtagcacactgcatgtatgccatacttcagaacaatcacacgcttttcacagaccttgagcgcaaaggactgctgattgcgtgtctgtgtcatgacctggaccacaggggcttcagtaacagctacctgcagaagttcgaccaccctctggccgctctctactccacttccaccatggagcagcaccacttctcccagactgtgtccatcctccagttggaagggcacaatatcttctccactctgagctccagtgaatatgagcaggtgcttgagatcatccgcaaagccatcattgccacagaccttgctttatactttggaaacaggaagcagttggaagagatgtaccagaccggatcactaaaccttaataatcaatcacatagagaccgtgtaattggtttgatgatgactgcctgtgacctttgttctgtgacaaaactgtggcccgttacaaaattgacggcaaatgatatatatgcagaattctgggctgagggtgatgaaatgaagaaattgggaatacagcctattcctatgatggacagagacaagaaggatgaagtcccccaaggccagcttgggttctacaatgccgtggccattccctgctatacaacccttacccagatcctccctcccacggagcctcttctgaaagcatgcagggataatctcagtcagtgggagaaggtgattcgaggggaggagactgcaacctggatttcatccccatccgtggctcagaaggcagctgcatctgaagattgagcactggtcaccctgacacgctgtcccacctacagatcctcatcttgcttctttgacattcttttcctttttttggggggggtggggggaacctgcacctggtaactggggtgcaaacctcttcaagaaggtaacatcaaataaataagtcaagcagaggacttcctgccaatctcttctgtgaggcatcatagacactgagcaaccaggaccacccccacgttcagaaatcagctggccaagtgactccatttgacttgcaaaccagccttttctaataggctaatattgctgaggccttaaaggaaatggacaaaaattatccagaaggggtacttttccattgtatctttctaataagggtttaaaatggtactattatggtattgtacttgggctttaacatcaatgttgctttgatgttgttggatataaataggaatttttacacattactattgtgaatggtgaatgttcatgtatgacctacttgtaattaacttgagttgtagtccacagcctcaggacaaatgtcgttgaggttacagagtaagaaatgatggcaaaacgtcaaactcttatttcagagcttcatgaatttagttagactaaacataattctttaagttcaacctaaagggctgagatcaataaatttaacactagacgaagtagacttcctgtctttttgagaagagatgaggtatatgttacaataaatctcagaacttcaagtagcagttcaaaagatgtcagtttttaaaattgtttttgttgttgtcttggcagttttactgaaccctttgcataaagaacaaaataaaagctcggcattgtaatttttttaatggacaagtcttatggatacgaagggtacatttttcataatgattcctttatattttcactttgtgtcattgcagaattttagactctcattcacaatgaaaagtttattttaaacattgtttaattaaaataccatacagttctcttttaaacatcaaaccataaaaagtgtattttgtaattttactctgacctgccgcagtcacctctcacttatctcttccacgtactgcacggtcgtatttcatgagctttctgtccatagcacagaaacagagcagaaagtagtacaatcatgttggaccttctttctgttctctttactcttctcacagatcagatcactccatagaagcctgtgggtttcgatggtttcttctatacacctttttggttgaccagtattactatacaatgtaagtgttttaaaaaatacgaaagtaatactctgcaccccttcctacaaagatgataaagcagtcacttctggcgcattttaataatttaaagatttttagtgcaatggcacggtaacctccaaacctgaattagacagagactcactcaggaagtgacaggcccatcatatcaaataacttattcacttttcatgtggcaggaaactggaatatcgcttttaataaaatggaaaaatatgcttctacatatttaccaccataggcgttttgttcatatgagcctggtttgtgcaaaattaaatcagaggcttctacaacatggtttatttatgttgtagcaaagttggctctacataaacattgttcttattttaaaattaacactatgtgttcagttttcttgtgggcttctgaaagttgccatcttccctccgtggagctccatttgctattttcattatacactatgaggtaaaatgtaataacaaaagagagagaagtaccactgtggctagatatatacacacacatatatatatggatggatgtaatatatgtagaacacacacatagatgtatataggatacacactcatgtatgtaaacgtatacatatgtgtatatatgatacatacacatacacacacacgagagacagaaggaaagagaggaagagagaagcaaacatgtaggaaaaaatataaatcagccccattctcccattctttaagaacaatgatttttcttgatggaaaatgcatatcacttgacagttgacaagaaagtgtcatttttgtgttagtgtatcatataattgaatttgaacaagatacatatttttctgcatacaaatttatgaagctggagtctaccaaacacagctttagtcacaaaagttagtttagttatctcatttcgcttggagatggaatttcaggaagggatatattatttaagattattgtttaattacaagaattttaaaagaatgtatgaattctgttttttaatatagaaaataattatggagttaggaatctcatggctacatttacatttttaggttattacagaaaattctcttaatttattatagtcaagtgtattatgtaatctctatttagaacagtttcccaaaggaatgtgattggatttactggttggttaatttcttgtgaaatattgtcataatagaagcacagcttgaacaaaagactgaattctgatataaactgtcaatattgcttttaccatgtgtaagatttacttagtaatcacagatttacctaaaataaaaggacccgggttgcagtgatatttagttaatgatttgttttggaaaacatgcagttaggagtatttttgtattttgtcagatgtttaggagacagactttcgggtcatgtttcttgtcttgttcccagatcttttcttaaaagaacagtgtgacaccagaagccaagagatggtttttactaacaacagctttgatgagttcctattaaggtcgtattgtgtattgtgccaaattttccacccagtataaatttagtaacccgctatgagcatatgtaggatattcaatttgcagatacttttgttggttatgttggtttataatagacaagttttatggtcatatgcaattattccattatctttttggacacagtgaatatgttttttagctaaaaatgtccttggaaacataaatgcctgccaataacatggaatattgaattcgggcaatgtgaattgattaattagaaaagggtcaaaagaaatacaatggatgtggaaactaattctaaaaaatagccctattaatagggcagagactctggtccatttcccagctgtacttctctctaagaggtgtatgaaaaacccatcttgcaaaagagaccaaaatattagacacaatcgttcccattcctgactcttcaatggaaaaggaaggtacagatgtttacagtggtgccccaggtgactcgttctcaccacaacaaaagcaactaattggaaactagatgtgttcaataatagatttcctcttttttggcatgctttttagattttttttcattttgtaaaatctcagttaatttttctttattggtatatttgtgtatgcgagacaaatcctgtattgtacaggatataaatagatgcataaatccttagatacctgggttttttaataggtttaggtttgggtattgtgtttctggtcttttaactcaaaattaaggtttgagctttaataggactaaattattcacctgccttggcctgtgcctttattttaaatactgcaattttacttcttcattcatgtatttattattttgcttttcttgcttaagtataattgaaaatatttgcaggaacgcacaattcattttatcaagttgaatgaataggaccattctctcctcatcagatttctgttctttatttgacttcattgacatataccctggtgactataaccagtgaactgttcagagtcagtcttttcggcaagaacttcagagaactgtgacactggttatgatgtgattttggggggtttcaggtacctaagcatgatttttaaaatcacttctctctttacatatttcgaacatatgtttgctttctacactttgcagattttatttaggatttaattctttaaagactatattcatttagtcactatagtggatctcttctactgcaagtattcatctgatttttaaattatgtaaaatgtaaatcagccaagtatgtcatccgttatagtttccccatgctttcagcgcatggccatgagatttttacatgtgcataagtatttagccaatacacattttgctgacttctttaaccatttatattgtttaaattagtaatatccaatgcagtgcacacttttttgtcttttttccaacggaatattttggttgtctgtagcgttggaagcattttatatgataaaaatagcaagaaaaaattaaaaagtgtcaacggtgtgctggttctaaattaagaagatagaacaaagagaaagacattaatgttacctaagaaacacatttaacatccgaagaagcaatgctgtcctcacttgatgtttctcttctcaacccagcaatggagagcagggcttgcaaagccgtacagagcctacgtgctctttcctgcaagtgggagaaaactaatcaatggcacacagggccaggtgtggccctgtgaggcaaaggataatgtcacctcaggaccaaggtggaaacttacagctgaatccagggcttactaagtagggaagtcagtttacatatttcagttttcctctgatgtttttgaggtactgtgtatttgcagaagtttaagcagaagggttttgtttctattgtaagttaggttctaaaagtgtataatctgatactctagcccaactgaaatattatatcttgggcgttacagcctttgtctttttctttagtcaccttaatacccagtcctatgctgtatctctgatagcctatataaatgacatataggaatattattttccatatgatctgttgtatggtgtatatgctatgtgttcatttcgtgtgcaagttcagagtgtaatagatttacccagagaaggtgtttctatacaatgcccctacctatttgaaattacatgcttgcccaacacactgtgaaatagttaccaaaatttgtacaaatgcagcatcttcattctttctgagaagacaagatggttttctttacatgaacaaatgaacaaaagagatcctagatccataacgtagctaaggcatctaagagtttgctgttgataatcttgctgaccaaaaactactggagagtaacacaggttatatgccatcacaaatacaatgctcatgaagaactgatttgtagagtcaatgaacctgtgtccagaattttaataggctctctattggaaggagaaagaatttcaagttaacagtatctaactttatcatagttgatgttagtaaattttaaaaaatgattttatatgtatgacaaaaatctttgtaaaatgcgcaagtgcaataatttaaagaggtcttaactttgcatttataaattataaatattgtacatgtgtgtaattttttcatgtattcatttgcagtctttgtatttaaaaaacatttactgttatgtttgtataatagaacagtaatcatttattataatctaggcaagttgtaaataaattcataattcaaacagccagtatatatgcatatatgagtgttatattgcaaaatctttgttttacttacatggttaaagcagcaagaattcttttgttgatatgtaattatacacataaaatatatatatgtatgatacatgaaatatatttagaaatgttcataattttaatggatatcctttggtgtgaataattgaatacagagtttttaaaata

SEQ ID NO: 400 - protein, 789 aa, Homo sapiens
MEDGPSNNASCFRRLTECFLSPSLTDEKVKAYLSLHPQVLDEFVSESVSAETVEKWLKRKNNKSEDESAPKEVSRYQDTNMQGVVYELNSYIEQRLDTGGDNQLLLYELSSIIKIATKADGFALYFLGECNNSLCIFTPPGIKEGKPRLIPAGPITQGTTVSAYVAKSRKTLLVEDILGDERFPRGTGLESGTRIQSVLCLPIVTAIGDLIGILELYRHWGKEAFCLSHQEVATANLAWASVAIHQVQVCRGLAKQTELNDFLLDVSKTYFDNIVAIDSLLEHIMIYAKNLVNADRCALFQVDHKNKELYSDLFDIGEEKEGKPVFKKTKEIRFSIEKGIAGQVARTGEVLNIPDAYADPRFNREVDLYTGYTTRNILCMPIVSRGSVIGVVQMVNKISGSAFSKTDENNFKMFAVFCALALHCANMYHRIRHSECIYRVTMEKLSYHSICTSEEWQGLMQFTLPVRLCKEIELFHFDIGPFENMWPGIFVYMVHRSCGTSCFELEKLCRFIMSVKKNYRRVPYHNWKHAVTVAHCMYAILQNNHTLFTDLERKGLLIACLCHDLDHRGFSNSYLQKFDHPLAALYSTSTMEQHHFSQTVSILQLEGHNIFSTLSSSEYEQVLEIIRKAIIATDLALYFGNRKQLEEMYQTGSLNLNNQSHRDRVIGLMMTACDLCSVTKLWPVTKLTANDIYAEFWAEGDEMKKLGIQPIPMMDRDKKDEVPQGQLGFYNAVAIPCYTTLTQILPPTEPLLKACRDNLSQWEKVIRGEETATWISSPSVAQKAAASED

SEQ ID NO: 401 - DNA, 6860 bp, Homo sapiens
  CDS (124)..(6309)
gccctgggagaaatcctcccttcactgggagagaacttctctcccagggcggtgcgacccggagctccagcgcccgagtctccacttcgtttgctgaaacttgctttctaccagctaagaaccatgctgcgagtgattgtggaatctgccagcaatatccctaaaacgaaatttggcaagccggatcctattgtttctgtcatttttaaggatgagaaaaagaaaacaaagaaagttgataatgaattgaaccctgtctggaatgagattttggagtttgacttgaggggtataccactggacttttcatcttcccttgggattattgtgaaagattttgagacaattggacaaaataaattaattggcacggcgactgtagccctgaaggacctgactggtgaccagagcagatccctgccgtacaagctgatctccctgctaaatgaaaaagggcaagatactggggccaccattgacttggtgatcggctatgatccgccttctgctccacatccaaatgacctgagcgggcccagcgtgccaggcatgggaggagatggggaagaagatgaaggtgatgaagacaggttggacaatgcagtcaggggccctgggcccaaggggccagttgggacggtgtcggaagctcagcttgctcggaggctcaccaaagtaaagaacagccggcggatgctgtcaaataagccacaggacttccagatccgcgtccgagtgattgagggccgacagttaagtggtaacaacataaggcctgtggtcaaagttcacgtctgtggccagacacaccgaacaagaatcaagagaggaaacaaccctttttttgatgagttgtttttctacaatgtcaacatgaccccttctgaattgatggatgagatcatcagcatccgggtttataattctcactctctgcgggcagattgtctgatgggggaatttaagattgatgttggatttgtttatgatgaacctggccatgctgtcatgagaaagtggcttcttctcaatgacccggaagataccagttcaggttctaaaggttatatgaaagtcagcatgtttgtcctgggaaccggagatgagcctcctcctgagagacgagatcgtgataatgacagtgatgatgtggagagtaatttgttactccctgctggcattgccctccggtgggtgaccttcttgctgaaaatctaccgagctgaggacatcccccagatggatgatgccttctcacagacagtaaaggaaatatttggaggcaatgcagataagaaaaatctcgtggatccttttgtagaagtttcctttgctggaaaaaaggtttgtacaaacataattgagaaaaatgcaaacccagagtggaatcaggtcgtcaatcttcagatcaagtttccttcagtgtgtgaaaaaataaaactaacaatatatgactgggaccgtcttactaaaaatgatgtagttggaacaacatatctacacctctctaaaattgctgcctctggtggggaagtggaagatttctcatcttcgggaactggggctgcatcatatacagtaaacacaggagaaacagaggtaggctttgttccaacgtttggaccttgttacctgaatctttatggaagccccagagagtacacgggattcccagacccctatgatgagctgaatactggaaagggggaaggagttgcctacagaggcaggatcttggttgaattagccacttttcttgagaagacaccaccagataaaaagcttgagcccatttcaaatgatgacctgctggttgttgagaaataccagcgaaggcggaagtacagcctgtctgccgtgtttcattcagccaccatgttgcaagatgttggtgaggccattcagtttgaagtcagcattgggaactatggcaacaagtttgacaccacctgtaagcctttggcatcaacaactcagtacagccgtgctgtatttgatggcaactactattattacttgccttgggcccacaccaagccagttgttaccctgacttcatactgggaggatattagtcatcgcctggatgcggtgaacactctcctagctatggcagaacggctgcaaacaaatatagaagctctaaaatcagggatacaaggtaaaattcctgcaaaccagctggctgaattgtggctgaagctgatagatgaagttatagaagacacgagatacacgttgcctctcacagaaggaaaagccaacgtcacagttctcgatactcagatccgaaagctgcggtccaggtctctctcccaaatacatgaggcggctgtgaggatgaggtcggaagccacagatgtgaagtccacactggcagaaattgaggactggcttgataaattaatgcagctgactgaagagccacagaacagcatgcctgacatcatcatctggatgatccggggagagaagagactggcctatgcacgaattcccgcacatcaggtcttgtactccaccagtggtgagaatgcatctggaaaatactgtgggaaaacccaaaccatctttctgaagtatccacaggagaaaaacaacgggccaaaggtgcctgtggagttgcgagtgaacatctggctaggcttaagtgctgtggagaagaagtttaacagcttcgcagaaggaactttcaccgtctttgctgaaatgtatgaaaatcaagctctcatgtttggaaaatggggtacttctggattagtaggacgtcataagttttctgatgtcacaggaaaaataaaactcaagagggaattttttctgcctccaaaaggctgggaatgggaaggagagtggatagttgatcctgaaagaagcttgctgactgaggcagatgcaggtcacacggagttcactgatgaagtctatcagaacgagagccgctaccccgggggcgactggaagccggccgaggacacctacacggatgcgaacggcgataaagcagcatcacccagcgagttgacttgtcctccaggttgggaatgggaagatgatgcatggtcttatgacataaatcgagcggtggatgagaaaggctgggaatatggaatcaccattcctcctgatcataagcccaaatcctgggttgcagcagagaaaatgtaccacactcatagacggcgaaggctggtccgaaaacgcaagaaagatttaacacagactgcttcaagcaccgcaagggccatggaggaattgcaagaccaagagggctgggaatatgcttctctaattggctggaaatttcactggaaacaacgtagttcagataccttccgccgcagacgctggaggagaaaaatggctccttcagaaacacatggtgcagctgccatctttaaacttgaaggtgcccttggggcagacactaccgaagatggggatgagaagagcctggagaaacagaagcacagtgccaccactgtgttcggagcaaacacccccattgtttcctgcaattttgacagagtctacatctaccatctgcgctgctatgtctatcaagccagaaacctcttggctttagataaggatagcttttcagatccatatgctcatatctgtttcctccatcggagcaaaaccactgagatcatccattcaaccctgaatcccacgtgggaccaaacaattatattcgatgaagttgaaatctatggggaaccccaaacagttctacagaatccacccaaagttatcatggaactttttgacaatgaccaagtgggcaaagatgaatttttaggacgaagcattttctctcctgtggtgaaactgaactcagaaatggacatcacacccaaacttctctggcacccagtaatgaatggagacaaagcctgcggggatgttcttgtaactgcagagctgattctgaggggcaaggatggctccaaccttcccattcttccccctcaaagggcgccaaatctatacatggtcccccaggggatcaggcctgtggtccagctcactgccattgagattctagcttggggcttaagaaatatgaaaaacttccagatggcttctatcacatcccccagtcttgttgtggagtgtggaggagaaagggtggaatcggtggtgatcaaaaaccttaagaagacacccaactttccaagttctgttctcttcatgaaagtgttcttgcccaaggaggaattgtacatgcccccactggtgatcaaggtcatcgaccacaggcagtttgggcggaagcctgtcgtcggccagtgcaccatcgagcgcctggaccgctttcgctgtgacccttatgcagggaaagaggacatcgtcccacagctcaaagcctcccttctgtctgccccaccatgccgggacatcgttatcgaaatggaagacaccaaaccattactggcttctaagctgacagaaaaggaggaagaaatcgtggactggtggagtaaattttatgcttcctcaggggaacatgaaaaatgcggacagtatattcagaaaggctattccaagctcaagatatataattgtgaactagaaaatgtagcagaatttgagggcctgacagacttctcagatacgttcaagttgtaccgaggcaagtcggatgaaaatgaagatccttctgtggttggagagtttaagggctcctttcggatctaccctctgccggatgaccccagcgtgccagcccctcccagacagtttcgggaattacctgacagcgtcccacaggaatgcacggttaggatttacattgttcgaggcttagagctccagccccaggacaacaatggcctgtgtgacccttacataaaaataacactgggcaaaaaagtcattgaagaccgagatcactacattcccaacactctcaacccagtctttggcaggatgtacgaactgagctgctacttacctcaagaaaaagacctgaaaatttctgtctatgattatgacacctttacccgggatgaaaaagtaggagaaacaattattgatctggaaaaccgattcctttcccgctttgggtcccactgcggcataccagaggagtactgtgtttctggagtcaatacctggcgagatcaactgagaccaacacagctgcttcaaaatgtcgccagattcaaaggcttcccacaacccatcctttccgaagatgggagtagaatcagatatggaggacgagactacagcttggatgaatttgaagccaacaaaatcctgcaccagcacctcggggcccctgaagagcggcttgctcttcacatcctcaggactcaggggctggtccctgagcacgtggaaacaaggactttgcacagcaccttccagcccaacatttcccagggaaaacttcagatgtgggtggatgttttccccaagagtttggggccaccaggccctcctttcaacatcacaccccggaaagccaagaaatactacctgcgtgtgatcatctggaacaccaaggacgttatcttggacgagaaaagcatcacaggagaggaaatgagtgacatctacgtcaaaggctggattcctggcaatgaagaaaacaaacagaaaacagatgtccattacagatctttggatggtgaagggaattttaactggcgatttgttttcccgtttgactaccttccagccgaacaactctgtatcgttgcgaaaaaagagcatttctggagtattgaccaaacggaatttcgaatcccacccaggctgatcattcagatatgggacaatgacaagttttctctggatgactacttgggtttcctagaacttgacttgcgtcacacgatcattcctgcaaaatcaccagagaaatgcagattggacatgattccggacctcaaagccatgaacccccttaaagccaagacagcctccctctttgagcagaagtccatgaaaggatggtggccatgctacgcagagaaagatggcgcccgcgtaatggctgggaaagtggagatgacattggaaatcctcaacgagaaggaggccgacgagaggccagccgggaaggggcgggacgaacccaacatgaaccccaagctggacttaccaaatcgaccagaaacctccttcctctggttcaccaacccatgcaagaccatgaagttcatcgtgtggcgccgctttaagtgggtcatcatcggcttgctgttcctgcttatcctgctgctcttcgtggccgtgctcctctactctttgccgaactatttgtcaatgaagattgtaaagccaaatgtgtaacaaaggcaaaggcttcatttcaagagtcatccagcaatgagagaatcctgcctctgtagaccaacatccagtgtgattttgtgtctgagaccacaccccagtagcaggttacgccatgtcaccgagccccattgattcccagagggtcttagtcctggaaagtcaggccaacaagcaacgtttgcatcatgttatctcttaagtattaaaagttttattttctaaagtttaaatcatgtttttcaaaatatttttcaaggtggctggttccatttaaaaatcatctttttatatgtgtcttcggttctagacttcagcttttggaaattgctaaatagaattcaaaaatctctgcatcctgaggtgatatacttcatatttgtaatcaactgaaagagctgtgcattataaaatcagttagaatagttagaacaattcttatttatgcccacaaccattgctatattttgtatggatgtcataaaagtctatttaacctctgtaatgaaactaaataaaaatgtttcacctttaaaaaaaaaaaaaaaaaa

SEQ ID NO: 402 - protein, 2061 aa, Homo sapiens
MLRVIVESASNIPKTKFGKPDPIVSVIFKDEKKKTKKVDNELNPVWNEILEFDLRGIPLDFSSSLGIIVKDFETIGQNKLIGTATVALKDLTGDQSRSLPYKLISLLNEKGQDTGATIDLVIGYDPPSAPHPNDLSGPSVPGMGGDGEEDEGDEDRLDNAVRGPGPKGPVGTVSEAQLARRLTKVKNSRRMLSNKPQDFQIRVRVIEGRQLSGNNIRPVVKVHVCGQTHRTRIKRGNNPFFDELFFYNVNMTPSELMDEIISIRVYNSHSLRADCLMGEFKIDVGFVYDEPGHAVMRKWLLLNDPEDTSSGSKGYMKVSMFVLGTGDEPPPERRDRDNDSDDVESNLLLPAGIALRWVTFLLKIYRAEDIPQMDDAFSQTVKEIFGGNADKKNLVDPFVEVSFAGKKVCTNIIEKNANPEWNQVVNLQIKFPSVCEKIKLTIYDWDRLTKNDVVGTTYLHLSKIAASGGEVEDFSSSGTGAASYTVNTGETEVGFVPTFGPCYLNLYGSPREYTGFPDPYDELNTGKGEGVAYRGRILVELATFLEKTPPDKKLEPISNDDLLVVEKYQRRRKYSLSAVFHSATMLQDVGEAIQFEVSIGNYGNKFDTTCKPLASTTQYSRAVFDGNYYYYLPWAHTKPVVTLTSYWEDISHRLDAVNTLLAMAERLQTNIEALKSGIQGKIPANQLAELWLKLIDEVIEDTRYTLPLTEGKANVTVLDTQIRKLRSRSLSQIHEAAVRMRSEATDVKSTLAEIEDWLDKLMQLTEEPQNSMPDIIIWMIRGEKRLAYARIPAHQVLYSTSGENASGKYCGKTQTIFLKYPQEKNNGPKVPVELRVNIWLGLSAVEKKFNSFAEGTFTVFAEMYENQALMFGKWGTSGLVGRHKFSDVTGKIKLKREFFLPPKGWEWEGEWIVDPERSLLTEADAGHTEFTDEVYQNESRYPGGDWKPAEDTYTDANGDKAASPSELTCPPGWEWEDDAWSYDINRAVDEKGWEYGITIPPDHKPKSWVAAEKMYHTHRRRRLVRKRKKDLTQTASSTARAMEELQDQEGWEYASLIGWKFHWKQRSSDTFRRRRWRRKMAPSETHGAAAIFKLEGALGADTTEDGDEKSLEKQKHSATTVFGANTPIVSCNFDRVYIYHLRCYVYQARNLLALDKDSFSDPYAHICFLHRSKTTEIIHSTLNPTWDQTIIFDEVEIYGEPQTVLQNPPKVIMELFDNDQVGKDEFLGRSIFSPVVKLNSEMDITPKLLWHPVMNGDKACGDVLVTAELILRGKDGSNLPILPPQRAPNLYMVPQGIRPVVQLTAIEILAWGLRNMKNFQMASITSPSLVVECGGERVESVVIKNLKKTPNFPSSVLFMKVFLPKEELYMPPLVIKVIDHRQFGRKPVVGQCTIERLDRFRCDPYAGKEDIVPQLKASLLSAPPCRDIVIEMEDTKPLLASKLTEKEEEIVDWWSKFYASSGEHEKCGQYIQKGYSKLKIYNCELENVAEFEGLTDFSDTFKLYRGKSDENEDPSVVGEFKGSFRIYPLPDDPSVPAPPRQFRELPDSVPQECTVRIYIVRGLELQPQDNNGLCDPYIKITLGKKVIEDRDHYIPNTLNPVFGRMYELSCYLPQEKDLKISVYDYDTFTRDEKVGETIIDLENRFLSRFGSHCGIPEEYCVSGVNTWRDQLRPTQLLQNVARFKGFPQPILSEDGSRIRYGGRDYSLDEFEANKILHQHLGAPEERLALHILRTQGLVPEHVETRTLHSTFQPNISQGKLQMWVDVFPKSLGPPGPPFNITPRKAKKYYLRVIIWNTKDVILDEKSITGEEMSDIYVKGWIPGNEENKQKTDVHYRSLDGEGNFNWRFVFPFDYLPAEQLCIVAKKEHFWSIDQTEFRIPPRLIIQIWDNDKFSLDDYLGFLELDLRHTIIPAKSPEKCRLDMIPDLKAMNPLKAKTASLFEQKSMKGWWPCYAEKDGARVMAGKVEMTLEILNEKEADERPAGKGRDEPNMNPKLDLPNRPETSFLWFTNPCKTMKFIVWRRFKWVIIGLLFLLILLLFVAVLLYSLPNYLSMKIVKPNV

SEQ ID NO: 403 - DNA, 7762 bp, Homo sapiens
  CDS (143)..(5647)
gcggccgcggaggcggaggcagccgcggaggcggaggcggccggcggggggtggcgaggggcgccgggcccccgcggacctgtcgtcctcggcccgtcctccggccccggccccgcgcggctgaggaggcgcggccaggaccatgtcggcgggcggccgtgacgaggagcggcggaagctggccgacatcatccaccactggaacgccaaccggctggacctgttcgagatcagccagccgaccgaggatttggagttccatggagtgatgagattttattttcaagataaagctgctggaaactttgcaacaaaatgtattcgggtctctagtactgccaccactcaagatgtaatcgaaacgctcgcggagaaatttcgacctgatatgcgaatgctgtcctctcccaagtattcactctatgaagtgcatgtcagcggagaaagaagattggatatagatgagaaacctctagttgtacaactgaattggaacaaagatgatcgggaaggcagatttgttcttaagaatgagaatgacgccattcctcctaaggctcaaagtaatggacctgaaaagcaggaaaaagaaggggttatccagaacttcaagagaactctctcaaagaaagaaaagaaggaaaaaaagaagagagaaaaagaggcattgcgacaggcatctgataaagatgatagacctttccaaggggaggatgttgaaaattctcgactggctgctgaggtttacaaagacatgccggaaaccagctttactcgaaccatttctaatcctgaggtggttatgaaacgacggaggcagcaaaaattggaaaagagaatgcaggaatttcggagctcagatgggcggcctgattcaggtggaacattgagaatttatgcagatagtttaaaaccaaatattccctacaagacaatcctgctgtctactacagatcctgcagactttgctgtggctgaagctttagagaagtatggtctggaaaaagaaaaccctaaggattactgcatcgcccgggttatgcttcctcctggagcccagcattctgatgaaaagggtgctaaagaaattattcttgatgatgatgagtgtcctttacaaatcttcagggaatggccaagtgacaaagggattttagtctttcagttgaagaggaggccaccagaccacatcccaaagaaaaccaagaaacacttggaaggcaagacacccaagggaaaggagagagctgacgggtctggctatggctccacccttcctccggagaagctgccctatttagtagagttaagcccagggagaaggaatcactttgcctactacaactatcacacttacgaagatggttctgactctagagataagccaaagctttaccgccttcagttaagtgttactgaagttgggacagaaaagttggatgacaactctatccagttgtttggcccaggaattcagccccatcactgtgaccttaccaacatggatggagtggtcactgtgacgcccagaagtatggacgcagaaacctacgtggaaggccagcgcatctcagaaaccaccatgctgcagagtggcatgaaagtgcagtttggggcgtcccatgtatttaagtttgtggaccccagtcaggatcatgctcttgcaaaaagatctgtggatggaggcctgatggttaagggcccaagacataaacctggaattgttcaggagacaacttttgatttgggaggagatattcatagtgggacagcattaccgacaagcaagagcaccactaggctggacagcgacagagtgtcgtctgcctctagcacagccgagcggggaatggtgaagccgatgatcagagtagaacagcagccagattatcgcaggcaagaaagcagaacacaggatgcttctgggcctgagctgatactacctgcaagcattgaattcagggaaagttctgaagattcatttttgtctgccattataaattatactaatagctctacagtccactttaagttgtcccctacatatgtattatatatggcatgccggtatgtattgtccaaccagtacagacctgacatcagccctacagagcgcacacataaagtcattgcagtcgtcaacaagatggtgagcatgatggagggtgtcatccagaaacagaagaatattgcaggggcacttgccttctggatggcaaatgcatctgaacttctcaacttcattaagcaagaccgagaccttagtcggatcacactggatgctcaagatgttttagcacatttggttcaaatggcatttaaatacttggttcactgtcttcaatcagaacttaataattacatgccagcctttctagatgaccctgaagagaacagtctgcaacgaccaaaaatagatgatgtgctgcacacgctcacaggagccatgtccttgctacgacgctgcagagtcaatgccgccctgaccatccagctcttctctcagctcttccacttcatcaatatgtggctgttcaatagattggtgaccgacccagattcggggctgtgctcccattactggggtgcgattatccgtcagcagttgggccatattgaagcctgggctgagaagcaggggctggaactggctgcggactgtcatctgagcaggatcgtgcaggcaacgactttgcttaccatggataagtatgcacctgatgacattccaaatataaacagcacctgctttaagttaaattcattacaacttcaagccttattacagaactatcactgtgcacctgatgagccttttatcccaacggatcttatagaaaatgtagtgactgtggctgaaaacactgccgatgagctggcccgcagtgatggaagggaagtgcagttggaggaggatcctgatctgcagctgccgtttcttttgccagaagatggttattcttgtgatgttgtcagaaacattccaaatggtttacaagaatttttagaccctctgtgccagagaggattttgcaggttaattcctcacacacgttcaccaggtacttggacaatatattttgaaggtgcagattatgaaagtcaccttctgcgtgagaacacagagctggctcagcctctgaggaaagaacctgaaataatcactgtgaccctaaaaaagcagaatggaatgggccttagcattgttgcagcaaagggtgctggtcaagataaactaggaatctatgtgaagtcggttgtgaaaggaggtgctgcagatgtggatggacgtctagctgcaggtgatcagctcctcagtgtggatggacgaagtctggttggactctctcaggaaagggcggcagaactcatgacaagaacaagctctgtggtgacactggaagtagcaaagcagggtgccatctaccacggtctggccacccttctcaatcagccatcccccatgatgcagagaatttcagatcgtcgtggctcaggtaaaccccgaccaaagagtgaaggctttgagctctataataattcaactcaaaatgggtctcctgagagtcctcagctgccttgggcagaatatagtgaaccaaagaaattgcctggtgatgacagactgatgaaaaatagagctgatcaccgttccagccccaacgtagcaaatcagcctcctagtcctggagggaaaagtgcatatgcctctggaacaacagcgaagataacatctgtctctactggaaacctctgcactgaggagcagacgcctccgcctagacctgaagcctaccccatccccactcagacgtacaccagagagtattttaccttcccagcttccaaatcccaggatcggatggctcctcctcagaaccagtggccaaattatgaggaaaagccacatatgcacacagatagtaatcattccagtattgcaattcagcgtgttacacgttcccaagaagaacttcgagaagataaagcttaccaacttgagcggcatcgaatagaggcagctatggaccgaaagtctgatagtgatatgtggataaatcagagctcctcactggactccagtacctctagccaggagcatctgaaccattcctctaagtcggtcacccctgcttccacactgaccaaaagtggccctggccgttggaaaacaccagcagccataccggccacccctgtggccgtctcccagccaatccgaacagacctgcctccgccacccccgccacctccagtccactatgccggtgatttcgatggaatgtccatggatttgcctctcccaccacccccttccgccaaccagatagggctgccgtctgcgcaggtggctgctgctgaacggagaaagagagaagaacatcagcgttggtatgagaaggagaaggcccgcctggaggaggagcgggagaggaagcggagagagcaggagaggaagttgggccagatgcgcactcagtccttaaaccctgctccgttttctcccctgactgcacagcagatgaagcccgaaaagccttccacactccagcggccacaggaaacagtcattcgggagctgcagcctcagcagcagccccgcacgatcgagcgcagagacttgcagtacattacagtcagcaaagaggagctttcctcgggggacagtctgtcccccgacccgtggaagcgggacgccaaggagaagctggagaagcagcagcagatgcacatcgtggacatgctgagcaaggagatccaggagctccagagcaaaccggaccgcagcgccgaggagagcgaccggctgcgcaagctcatgctggagtggcagttccagaagagactccaggagtcgaagcagaaggacgaagatgacgaggaggaggaggacgatgatgtggacaccatgctgatcatgcagcgcctggaggctgaacgaagagcgaggactgctatgccagcaatctctgttctagatttgttgcaggacgaggagcggaggcggcagcagcagttagaagagatgcgcaagcgggaagcggaagaccgagcgaggcaagaggaagagcgccggcggcaggaggaggagcgaacaaaacgagacgctgaagaaaagaggcgacaggaagaagggtattacagccgcctggaagccgagaggcgcagacagcacgacgaggcggcgcgcaggttgctggagcccgaggcgcccggtctgtgccgccctccgcttccccgggactacgagcccccgtccccgtcccccgcgcccggcgcccctcctcccccgcctcagcgaaacgcctcctacctcaaaacacaggtcctctcccccgactcgctgttcactgccaagtttgttgcatacaatgaggaggaggaggaggaggactgcagcctagcaggaccaaactcttacccaggatctactggagcagctgttggagcccatgacgcctgtcgggatgcaaaagagaagcgctctaaaagccaagatgcagattcacctggaagttctggggcccctgaaaacttgacattcaaggaacgccagcgtcttttttcacaaggtcaagatgtatccaataaagtgaaagcttctcgtaaattaacagaactggagaatgaactgaacacaaagtgaaagaaaatgaggagaacactttgtatttaccccaaaatcttttcagttgtgggtttgtaggtgcgagtttgaagaggaaaagaggaagggggttatatttctaagtgatttacaatttctgtttctaaaattgttgggatttagaaatgtttcaattccaagaaattttattttactttaccatgagattgccatttatgtaatttaaacactgtctagtttcttaattatctaactcacacgagggtaagttttttgttggtttcttttttggagtcctgagttcaaaggggacagaactaagggcaggagaagagaatggatgtgtcttctctcccatcttcccctcatcatcgaccgaggagcacaaagaagttctgtttctgtttttttcagaaactttattttagctgtcaagcagagaatagcttgaactattcagactattgttggcactgtttagtagtgaccacacgctcttctacccgggaaggaacatatgacgacatgctcctcccatgtcccctgatggtgtctgttcccacaatatccttctagtctgcatcgtgaagtggcttaggccaaagcttcctgtgtgatgacgcacgtccgagactgttccatctcattcctcgcaaatttgagctcttctgatcaattctaaatatttgattaattttaattctgaaagaaaattttgaggatttaagcttaggggattttatttttataaataccagattattgttagacttaataaatcactgttaaatttaaagatgacagttaccttggaaagttcactaatacttcgctccaaggcgtctgtaaaagaagatatctttattggagcaatgttcatgtgactgggaatgacagaagaatgggagatgagtagggacccctcaagcacagctgtcactcagaaattttaaatttgaaaaagaaatcgattttcatctgtatgccgtcaaggaaggaattcagttacagggcatctgtaacttaaatattgtaagaataactcatatggaagttcaagctatttttatactataatagagttatttaattttaatttgttgaattattagttaccactgtcatttcttcagctatggatatgtggctgatgttggggagacggacctcagtgtgttttatattgtctggtgttaagatgataaattactttgtgattacaagcaaattttctatttgacaaagcccttggtggagtccaaatgatttttctgtaccatattgttctcttacacatacgtatgttaggaaaataggcacactttcaaagagaatgttctcttacacatacgtatgttaggaaaatagacacattttcaaagagaatgttctcttacatatgttaggaaaataggcacactttcaaagagaggtataggggctttttactgccttcgaaatcacttttaataaaagttgtatgataaatcattaaaaatgcgagtgtaaatatttttttttacctctatcagggtttttatttgaaagtgtgctcttaccatttccttgtttgagtaagagagtgaatggttctgagtgtttaggaaggatttgcttgcttgcagcagaagttctaggaaaagcaggcacctcccaaatatcttgaggacactggcagccttatggtgactaaatccacactttctttaaagagatgcagatgaattacttttctgttaatatatagaaaaatacacaggagaacatgcagatacatgtaaatatctacatacagggatatttgtatgtgtggttgtgaaacccatacacaagtggatttggccatctttgggcagtgaggtcaaatgtgaatatgtgtaaaagtgcttttcagaactgcattactatgagaaaacatcaaaactgctgtagttttccatttctactgtatttcagttgcaacctatttttaataaactttgtatgtatttaagtgtatttgctattgttttgaaagtgctgacaaagtttatatttgtaacatcagccttcctcgcccatctctttccatctgtctcttcttcattaaacacttactgagtatgaaaaaaaaaaaaaaaaaaaaaaaaaaaa

SEQ ID NO: 404 - protein, 1834 aa, Homo sapiens
MSAGGRDEERRKLADIIHHWNANRLDLFEISQPTEDLEFHGVMRFYFQDKAAGNFATKCIRVSSTATTQDVIETLAEKFRPDMRMLSSPKYSLYEVHVSGERRLDIDEKPLVVQLNWNKDDREGRFVLKNENDAIPPKAQSNGPEKQEKEGVIQNFKRTLSKKEKKEKKKREKEALRQASDKDDRPFQGEDVENSRLAAEVYKDMPETSFTRTISNPEVVMKRRRQQKLEKRMQEFRSSDGRPDSGGTLRIYADSLKPNIPYKTILLSTTDPADFAVAEALEKYGLEKENPKDYCIARVMLPPGAQHSDEKGAKEIILDDDECPLQIFREWPSDKGILVFQLKRRPPDHIPKKTKKHLEGKTPKGKERADGSGYGSTLPPEKLPYLVELSPGRRNHFAYYNYHTYEDGSDSRDKPKLYRLQLSVTEVGTEKLDDNSIQLFGPGIQPHHCDLTNMDGVVTVTPRSMDAETYVEGQRISETTMLQSGMKVQFGASHVFKFVDPSQDHALAKRSVDGGLMVKGPRHKPGIVQETTFDLGGDIHSGTALPTSKSTTRLDSDRVSSASSTAERGMVKPMIRVEQQPDYRRQESRTQDASGPELILPASIEFRESSEDSFLSAIINYTNSSTVHFKLSPTYVLYMACRYVLSNQYRPDISPTERTHKVIAVVNKMVSMMEGVIQKQKNIAGALAFWMANASELLNFIKQDRDLSRITLDAQDVLAHLVQMAFKYLVHCLQSELNNYMPAFLDDPEENSLQRPKIDDVLHTLTGAMSLLRRCRVNAALTIQLFSQLFHFINMWLFNRLVTDPDSGLCSHYWGAIIRQQLGHIEAWAEKQGLELAADCHLSRIVQATTLLTMDKYAPDDIPNINSTCFKLNSLQLQALLQNYHCAPDEPFIPTDLIENVVTVAENTADELARSDGREVQLEEDPDLQLPFLLPEDGYSCDVVRNIPNGLQEFLDPLCQRGFCRLIPHTRSPGTWTIYFEGADYESHLLRENTELAQPLRKEPEIITVTLKKQNGMGLSIVAAKGAGQDKLGIYVKSVVKGGAADVDGRLAAGDQLLSVDGRSLVGLSQERAAELMTRTSSVVTLEVAKQGAIYHGLATLLNQPSPMMQRISDRRGSGKPRPKSEGFELYNNSTQNGSPESPQLPWAEYSEPKKLPGDDRLMKNRADHRSSPNVANQPPSPGGKSAYASGTTAKITSVSTGNLCTEEQTPPPRPEAYPIPTQTYTREYFTFPASKSQDRMAPPQNQWPNYEEKPHMHTDSNHSSIAIQRVTRSQEELREDKAYQLERHRIEAAMDRKSDSDMWINQSSSLDSSTSSQEHLNHSSKSVTPASTLTKSGPGRWKTPAAIPATPVAVSQPIRTDLPPPPPPPPVHYAGDFDGMSMDLPLPPPPSANQIGLPSAQVAAAERRKREEHQRWYEKEKARLEEERERKRREQERKLGQMRTQSLNPAPFSPLTAQQMKPEKPSTLQRPQETVIRELQPQQQPRTIERRDLQYITVSKEELSSGDSLSPDPWKRDAKEKLEKQQQMHIVDMLSKEIQELQSKPDRSAEESDRLRKLMLEWQFQKRLQESKQKDEDDEEEEDDDVDTMLIMQRLEAERRARTAMPAISVLDLLQDEERRRQQQLEEMRKREAEDRARQEEERRRQEEERTKRDAEEKRRQEEGYYSRLEAERRRQHDEAARRLLEPEAPGLCRPPLPRDYEPPSPSPAPGAPPPPPQRNASYLKTQVLSPDSLFTAKFVAYNEEEEEEDCSLAGPNSYPGSTGAAVGAHDACRDAKEKRSKSQDADSPGSSGAPENLTFKERQRLFSQGQDVSNKVKASRKLTELENELNTK

SEQ ID NO: 405 - DNA, 2538 bp, Homo sapiens
  CDS (109)..(1149)
atgcgcagaagcactccgggcgtgctgccggcggcggtaggtggcgcgcgggtccggcgggcggttggcttgagcgggaccggagctgaggcaggaagagccggcgccatggtggagaaggaggaggctggcggcggcattagcgaggaggaggcggcacagtatgaccggcagatccgcctgtggggactggaggcccagaaacggctgcgggcctctcgggtgcttcttgtcggcttgaaaggacttggggctgaaattgccaagaatctcatcttggcaggagtgaaaggactgaccatgctggatcacgaacaggtaactccagaagatcccggagctcagttcttgattcgtactgggtctgttggccgaaatagggctgaagcctctttggagcgagctcagaatctcaaccccatggtggatgtgaaggtggacactgaggatatagagaagaaaccagagtcatttttcactcaattcgatgctgtgtgtctgacttgctgctccagggatgtcatagttaaagttgaccagatctgtcacaaaaatagcatcaagttctttacaggagatgtttttggctaccatggatacacatttgccaatctaggagagcatgagtttgtagaggagaaaactaaagttgccaaagttagccaaggagtagaagatgggcccgacaccaagagagcaaaacttgattcttctgagacaacgatggtcaaaaagaaggtggtcttctgccctgttaaagaagccctggaggtggactggagcagtgagaaagcaaaggctgctctgaagcgcacgacctccgactactttctccttcaagtgctcttaaagttccgtacagataaaggaagagatcccagttctgatacatatgaggaagattctgagttgttgctccagatacgaaatgatgtgcttgactcactgggtattagtcctgacctgcttcctgaggactttgtcaggtactgcttctccgagatggccccagtgtgtgcggtggttggagggattttggcacaggaaattgtgaaggccctgtctcagcgggaccctcctcacaacaacttcttcttcttcgatggcatgaaggggaatgggattgtggagtgccttggccccaagtgaactcaagatttggcagccccagagatgccaactgcagcatgcccacctgtattccctgtccccttccttcatgaaggcatctccaggcaaggaaaactgaagtcattggcccgatacaaaacatttcctgcaacgaaggaggtggtgccgacgtgctgcttcccatcaccagcagctgctcgacaaggggcgcagggtggctgtctttgttccagcactgttcaggctgcctgtcatcccgggcctgccagctcccctgagtgatgagcacttccaagcacccctctgccctttctctgtccttatgctgtcccggcctcgccagccctctggggcattgtgggagatgcctgccaggaatgagcaagctctgttgctcgggagcctcttgtcaccttcttggacttattccccacctgataccttatagagaaaagtgtgaattcaggtggagagtaggcccaggccccatgaggcaccagtggaagcacagctccaagttcagacaggtgcccttagagaggaaaaccatgacaggcaaatgcatttcctctggagtttgagaccctgacaaacaacaggtggcatctggtgtgctgttcttgagttttcgtttaggattagttgagttccagctgggttttgggagaaaggagatgctaccaagtcttggatgttagggcgagaccctgcaagttgagtattagagagcttgtctttcaaggcaggttcctggggcttcagggctaggagggaggagcctgcccttttaacagaaccccagtcacatgcggctcaagtcactcagaggctgttgcatttcagggctatgttggtcctttgtttacctcctaaaccacagctgtttgtgtttcacatatgttgtgaattttccttggttctttttaaaggaatgataataaagttacttgctttaggatttgcttgtttttcttccacttcagaagcttctgagagggaatgggatgatcctaccagttgccttttcagacctgaggctctaactcaagagattcctcctctccctcaccattcctgccaccattttttctgggtgatgcagcaagagttaaattgttcacattctagaatgtgtagaagcttctggctccagttgtctaatggataattcagctaaatagtggctattttcagtggcaagaattataataataaagggaagtcaaaagtgatgcttcatatgccccaagtgccacagccgctacgggtcagagcttttattggaagaccaggtttgccttgatgcagccaaagtgcgttccagttcaccccactcttgcttgtgtttcttctttatgtaaattgtgtgatgtttcaataaatcagtctctttcctattctgaaaaa

SEQ ID NO: 406 - protein, 346 aa, Homo sapiens
MVEKEEAGGGISEEEAAQYDRQIRLWGLEAQKRLRASRVLLVGLKGLGAEIAKNLILAGVKGLTMLDHEQVTPEDPGAQFLIRTGSVGRNRAEASLERAQNLNPMVDVKVDTEDIEKKPESFFTQFDAVCLTCCSRDVIVKVDQICHKNSIKFFTGDVFGYHGYTFANLGEHEFVEEKTKVAKVSQGVEDGPDTKRAKLDSSETTMVKKKVVFCPVKEALEVDWSSEKAKAALKRTTSDYFLLQVLLKFRTDKGRDPSSDTYEEDSELLLQIRNDVLDSLGISPDLLPEDFVRYCFSEMAPVCAVVGGILAQEIVKALSQRDPPHNNFFFFDGMKGNGIVECLGPK

SEQ ID NO: 407 - DNA, 1880 bp, Homo sapiens
  CDS (53)..(811)
agccgagaggtgtcacccccagcgggcgcgggccggagcacgggcacccagcatgggggtactgctcacacagaggacgctgctcagtctggtccttgcactcctgtttccaagcatggcgagcatggcggctataggcagctgctcgaaagagtaccgcgtgctccttggccagctccagaagcagacagatctcatgcaggacaccagcagactcctggacccctatatacgtatccaaggcctggatgttcctaaactgagagagcactgcagggagcgccccggggccttccccagtgaggagaccctgagggggctgggcaggcggggcttcctgcagaccctcaatgccacactgggctgcgtcctgcacagactggccgacttagagcagcgcctccccaaggcccaggatttggagaggtctgggctgaacatcgaggacttggagaagctgcagatggcgaggccgaacatcctcgggctcaggaacaacatctactgcatggcccagctgctggacaactcagacacggctgagcccacgaaggctggccggggggcctctcagccgcccacccccacccctgcctcggatgcttttcagcgcaagctggagggctgcaggttcctgcatggctaccatcgcttcatgcactcagtggggcgggtcttcagcaagtggggggagagcccgaaccggagccggagacacagcccccaccaggccctgaggaagggggtgcgcaggaccagaccctccaggaaaggcaagagactcatgaccaggggacagctgccccggtagcctcgagagcaccccttgccggtgaaggatgcggcaggtgctctgtggatgagaggaaccatcgcaggatgacagctcccgggtccccaaacctgttcccctctgctactagccactgagaagtgcactttaagaggtgggagctgggcagacccctctacctcctccaggctgggagacagagtcaggctgttgcgctcccacctcagccccaagttccccaggcccagtggggtggccgggcgggccacgcgggaccgactttccattgattcaggggtctgatgacacaggctgactcatggccgggctgactgcccccctgccttgctccccgaggcctgccggtccttccctctcatgacttgcagggccgttgcccccagacttcctcctttccgtgtttctgaaggggaggtcacagcctgagctggcctcctatgcctcatcatgtcccaaaccagacacctggatgtctgggtgacctcactttaggcagctgtaacagcggcagggtgtcccaggagccctgatccgggggtccagggaatggagctcaggtcccaggccagccccgaagtcgccacgtggcctggggcaggtcactttacctctgtggacctgttttctctttgtgaagctagggagttagaggctgtacaaggcccccactgcctgtcggttgcttggattccctgacgtaaggtggatattaaaaatctgtaaatcaggacaggtggtgcaaatggcgctgggaggtgtacacggaggtctctgtaaaagcagacccacctcccagcgccgggaagcccgtcttgggtcctcgctgctggctgctccccctggtggtggatcctggaattttctcacgcaggagccattgctctcctagagggggtctcagaaactgcgaggccagttccttggagggacatgactaatttatcgatttttatcaatttttatcagttttatatttataagccttatttatgatgtatatttaatgttaatattgtgcaaacttatatttaaaacttgcctggtttctaaaaaaaaaaaaaaaaaa

SEQ ID NO: 408 - protein, 252 aa, Homo sapiens
MGVLLTQRTLLSLVLALLFPSMASMAAIGSCSKEYRVLLGQLQKQTDLMQDTSRLLDPYIRIQGLDVPKLREHCRERPGAFPSEETLRGLGRRGFLQTLNATLGCVLHRLADLEQRLPKAQDLERSGLNIEDLEKLQMARPNILGLRNNIYCMAQLLDNSDTAEPTKAGRGASQPPTPTPASDAFQRKLEGCRFLHGYHRFMHSVGRVFSKWGESPNRSRRHSPHQALRKGVRRTRPSRKGKRLMTRGQLPR

SEQ ID NO: 409 - DNA, 4576 bp, Homo sapiens
  CDS (266)..(4231)
cggcagaggaggaggaggaggcggtgctcgcgccgggcggtagagcggcgctgggacccatgcggccgtgacccccggctccctagaggcccagcgcagccgcagcggacaaaggagcatgtccgcgccggggaaggcccgtcctccggccgccataaggctccggtcgccgctgggcccgcgccgcgctcctgcccgcccgggctccggggcggcccgctaggccagtgcgccgccgctcgccccgcaggccccggcccgcagcatggagccacccggacgccggcggggccgcgcgcagccgccgctgttgctgccgctctcgctgttagcgctgctcgcgctgctgggaggcggcggcggcggcggcgccgcggcgctgcccgccggctgcaagcacgatgggcggccccgaggggctggcagggcggcgggcgccgccgagggcaaggtggtgtgcagcagcctggaactcgcgcaggtcctgcccccagatactctgcccaaccgcacggtcaccctgattctgagtaacaataagatatccgagctgaagaatggctcattttctgggttaagtctccttgaaagattggacctccgaaacaatcttattagtagtatagatccaggtgccttctggggactgtcatctctaaaaagattggatctgacaaacaatcgaataggatgtctgaatgcagacatatttcgaggactcaccaatctggttcggctaaacctttcggggaatttgttttcttcattatctcaaggaacttttgattatcttgcgtcattacggtctttggaattccagactgagtatcttttgtgtgactgtaacatactgtggatgcatcgctgggtaaaggagaagaacatcacggtacgggataccaggtgtgtttatcctaagtcactgcaggcccaaccagtcacaggcgtgaagcaggagctgttgacatgcgaccctccgcttgaattgccgtctttctacatgactccatctcatcgccaagttgtgtttgaaggagacagccttcctttccagtgcatggcttcatatattgatcaggacatgcaagtgttgtggtatcaggatgggagaatagttgaaaccgatgaatcgcaaggtatttttgttgaaaagaacatgattcacaactgctccttgattgcaagtgccctaaccatttctaatattcaggctggatctactggaaattggggctgtcatgtccagaccaaacgtgggaataatacgaggactgtggatattgtggtattagagagttctgcacagtactgtcctccagagagggtggtaaacaacaaaggtgacttcagatggcccagaacattggcaggcattactgcatatctgcagtgtacgcggaacacccatggcagtgggatatatcccggaaacccacaggatgagagaaaagcttggcgcagatgtgatagaggtggcttttgggcagatgatgattattctcgctgtcagtatgcaaatgatgtcactagagttctttatatgtttaatcagatgcccctcaatcttaccaatgccgtggcaacagctcgacagttactggcttacactgtggaagcagccaacttttctgacaaaatggatgttatatttgtggcagaaatgattgaaaaatttggaagatttaccaaggaggaaaaatcaaaagagctaggtgacgtgatggttgacattgcaagtaacatcatgttggctgatgaacgtgtcctgtggctggcgcagagggaagctaaagcctgcagtaggattgtgcagtgtcttcagcgcattgctacctaccggctagccggtggagctcacgtttattcaacatattcacccaatattgctctggaagcttatgtcatcaagtctactggcttcacggggatgacctgtaccgtgttccagaaagtggcagcctctgatcgtacaggactttcggattatgggaggcgggatccagagggaaacctggataagcagctgagctttaagtgcaatgtttcaaatacattttcgagtctggcactaaagaatactattgtggaggcttctattcagcttcctccttcccttttctcaccaaagcaaaaaagagaactcagaccaactgatgactctctttacaagcttcaactcattgcattccgcaatggaaagctttttccagccactggaaattcaacaaatttggctgatgatggaaaacgacgtactgtggttacccctgtgattctcaccaaaatagatggtgtgaatgtagatacccaccacatccctgttaatgtgacactgcgtcgaattgcacatggagcagatgctgttgcagcccggtgggatttcgatttgctgaacggacaaggaggctggaagtcagatgggtgccatatactctattcagatgaaaatatcactacgattcagtgctactcccttagtaactatgcagttttaatggatttgacgggatctgaactatacacccaggcggccagcctcctgcatcctgtggtttatactaccgctatcattctcctcttatgtctcttagccgtcattgtcagttacatataccatcacagtttgattagaatcagcctcaagagctggcacatgcttgtgaacttgtgctttcatattttcctaacctgtgtggtctttgtgggaggaataacccagactaggaatgccagcatctgccaagcagttgggataattcttcactattccacccttgccacagtactatgggtaggagtgacagctcgaaatatctacaaacaagtcactaaaaaagctaaaagatgccaggatcctgatgaaccaccacctccaccaagaccaatgctcagattttacctgattggtggtggtatccccatcattgtttgcggcataactgcagcagcgaacattaagaattacggcagtcggccaaacgcaccctattgctggatggcatgggaaccctccttgggagccttctatgggccagccagcttcatcacttttgtaaactgcatgtactttctgagcatatttattcagttgaaaagacaccctgagcgcaaatatgagcttaaggagcccacggaggagcaacagagattggcagccaatgaaaatggcgaaataaatcatcaggattcaatgtctttgtctctgatttctacatcagccttggaaaatgagcacacttttcattctcagctcttgggggccagccttactttgctcttatatgttgcactgtggatgtttggggctttggctgtttctttgtattaccctttggacttggtttttagcttcgtttttggagccacaagtttaagcttcagtgcgttcttcgtggtccaccattgtgttaatagggaggatgttagacttgcgtggatcatgacttgctgcccaggacggagctcgtattcagtgcaagtcaacgtccagccccccaactctaatgggacgaatggagaggcacccaaatgccccaatagcagtgcggagtcttcatgcacaaacaaaagtgcttcaagcttcaaaaattcctcccagggctgcaaattaacaaacttgcaggcggctgcagctcagtgccatgccaattctttacctttgaactccacccctcagcttgataatagtctgacagaacattcaatggacaatgatattaaaatgcacgtggcgcctttagaagttcagtttcgaacaaatgtgcactcaagccgccaccataaaaacagaagtaaaggacaccgggcaagccgactcacagtcctgagagaatatgcctacgatgtcccaacgagcgtggaaggaagcgtgcagaacggcttacctaaaagccggctgggcaataacgaaggacactcgaggagccgaagagcttatttagcctacagagagagacagtacaacccaccccagcaagacagcagcgatgcttgtagcacacttcccaaaagtagcagaaattttgaaaagccagtttcaaccactagtaaaaaagatgcgttaaggaagccagctgtggttgaacttgaaaatcagcaaaaatcttatggcctcaacttggccattcagaatggaccaattaaaagcaatgggcaggagggacccttgctcggtaccgatagcactggcaatgttaggactggattatggaaacacgaaactactgtgtaacattgctgggcttcctaggcagaaattcatataaactgtgatactcacattccttgaagctatgagcatttaaaaactgtttacagccaccatagggattcaaaagaatttggaataaactttgaagttttggattttacttatttttatccccaaattgttgctattttttaggatctgaaacaaaatctttctaaaacattgttttagttgtcaaagcaccaacaggacattttgggatgtgaaatgtaatttcttggaatctgtaatttgtacttaatatttcaggcttgtatttaatataataaataggtgtttgttattgtgtcaaaaaaaaaaaaaaaa

SEQ ID NO: 410 - protein, 1321 aa, Homo sapiens
MEPPGRRRGRAQPPLLLPLSLLALLALLGGGGGGGAAALPAGCKHDGRPRGAGRAAGAAEGKVVCSSLELAQVLPPDTLPNRTVTLILSNNKISELKNGSFSGLSLLERLDLRNNLISSIDPGAFWGLSSLKRLDLTNNRIGCLNADIFRGLTNLVRLNLSGNLFSSLSQGTFDYLASLRSLEFQTEYLLCDCNILWMHRWVKEKNITVRDTRCVYPKSLQAQPVTGVKQELLTCDPPLELPSFYMTPSHRQVVFEGDSLPFQCMASYIDQDMQVLWYQDGRIVETDESQGIFVEKNMIHNCSLIASALTISNIQAGSTGNWGCHVQTKRGNNTRTVDIVVLESSAQYCPPERVVNNKGDFRWPRTLAGITAYLQCTRNTHGSGIYPGNPQDERKAWRRCDRGGFWADDDYSRCQYANDVTRVLYMFNQMPLNLTNAVATARQLLAYTVEAANFSDKMDVIFVAEMIEKFGRFTKEEKSKELGDVMVDIASNIMLADERVLWLAQREAKACSRIVQCLQRIATYRLAGGAHVYSTYSPNIALEAYVIKSTGFTGMTCTVFQKVAASDRTGLSDYGRRDPEGNLDKQLSFKCNVSNTFSSLALKNTIVEASIQLPPSLFSPKQKRELRPTDDSLYKLQLIAFRNGKLFPATGNSTNLADDGKRRTVVTPVILTKIDGVNVDTHHIPVNVTLRRIAHGADAVAARWDFDLLNGQGGWKSDGCHILYSDENITTIQCYSLSNYAVLMDLTGSELYTQAASLLHPVVYTTAIILLLCLLAVIVSYIYHHSLIRISLKSWHMLVNLCFHIFLTCVVFVGGITQTRNASICQAVGIILHYSTLATVLWVGVTARNIYKQVTKKAKRCQDPDEPPPPPRPMLRFYLIGGGIPIIVCGITAAANIKNYGSRPNAPYCWMAWEPSLGAFYGPASFITFVNCMYFLSIFIQLKRHPERKYELKEPTEEQQRLAANENGEINHQDSMSLSLISTSALENEHTFHSQLLGASLTLLLYVALWMFGALAVSLYYPLDLVFSFVFGATSLSFSAFFVVHHCVNREDVRLAWIMTCCPGRSSYSVQVNVQPPNSNGTNGEAPKCPNSSAESSCTNKSASSFKNSSQGCKLTNLQAAAAQCHANSLPLNSTPQLDNSLTEHSMDNDIKMHVAPLEVQFRTNVHSSRHHKNRSKGHRASRLTVLREYAYDVPTSVEGSVQNGLPKSRLGNNEGHSRSRRAYLAYRERQYNPPQQDSSDACSTLPKSSRNFEKPVSTTSKKDALRKPAVVELENQQKSYGLNLAIQNGPIKSNGQEGPLLGTDSTGNVRTGLWKHETTV

SEQ ID NO: 411 - DNA, 4076 bp, Homo sapiens
  CDS (397)..(3666)
tctcccgagaacctcaccccccggtattcccctcaccctgaagtaagggagtctccctcttcccctcagctcctaaccaaggtgctcagtaccgcggctagggtgcccagcgggaggctgggtagttaccggaggaggcagagccggtcgcacgcctgggtcccagcggaggcccagtcgactctcgacccgggccccagcctccttgcgtggcgaaggtcgtgcctcaggtctcctggcgaacctggccgcccggaagcggagagtgactcctccccttcgtcccctcggtgcccgccaggcggcgccgtcggctgggcccggattcccctgcggcttcgatccctttccactgggtattgagattggcgaggggagaggcgcagaaacggcgtgatgcagaaagcctcagtgttgctcttcctggcctgggtctgcttcctcttctacgctggcattgccctcttcaccagtggcttcctgctcacccgtttggagctcaccaaccatagcagctgccaagagcccccaggccctgggtccctgccatgggggagccaagggaaacctggggcctgctggatggcttcccgattttcgcgggttgtgttggtgctgatagatgctctgcgatttgacttcgcccagccccagcattcacacgtgcctagagagcctcctgtctccctacccttcctgggcaaactaagctccttgcagaggatcctggagattcagccccaccatgcccggctctaccgatctcaggttgaccctcctaccaccaccatgcagcgcctcaaggccctcaccactggctcactgcctacctttattgatgctggtagtaacttcgccagccacgccatagtggaagacaatctcattaagcagctcaccagtgcaggaaggcgtgtagtcttcatgggagatgatacctggaaagaccttttccctggtgctttctccaaagctttcttcttcccatccttcaatgtcagagacctagacacagtggacaatggcatcctggaacacctctaccccaccatggacagtggtgaatgggacgtgctgattgctcacttcctgggtgtggaccactgtggccacaagcatggccctcaccaccctgaaatggccaagaaacttagccagatggaccaggtgatccagggacttgtggagcgtctggagaatgacacactgctggtagtggctggggaccatgggatgaccacaaatggagaccatggaggggacagtgagctggaggtctcagctgctctctttctgtatagccccacagcagtcttccccagcaccccaccagaggagccagaggtgattcctcaagttagccttgtgcccacgctggccctgctgctgggcctgcccatcccatttgggaatatcggggaagtgatggctgagctattctcagggggtgaggactcccagccccactcctctgctttagcccaagcctcagctctccatctcaatgctcagcaggtgtcccgatttcttcatacctactcagctgctactcaggaccttcaagctaaggagcttcatcagctgcagaacctcttctccaaggcctctgctgactaccagtggcttctccagagccccaagggggctgaggcgacactgccgactgtgattgctgagctgcagcagttcctgcggggagctcgggccatgtgcatcgagtcttgggctcgtttctctctggtccgcatggcggggggtactgctctcttggctgcttcctgctttatctgcctgctggcatctcagtgggcaatatccccaggctttccattctgccctctactcctgacacctgtggcctggggcctggttggggccatagcgtatgctggactcctgggaactattgagctgaagctagatctagtgcttctaggggctgtggctgcagtgagctcattcctcccttttctgtggaaagcctgggctggctgggggtccaagaggcccctggcaaccctgtttcccatccctgggcccgtcctgttactcctgctgtttcgcttggctgtgttcttctctgatagttttgttgtagctgaggccagggccacccccttccttttgggctcattcatcctgctcctggttgtccagcttcactgggagggccagctgcttccacctaagctactcacaatgccccgccttggcacttcagccacaacaaaccccccacggcacaatggtgcatatgccctgaggcttggaattgggttgcttttatgtacaaggctagctgggctttttcatcgttgccctgaagagacacctgtttgccactcctctccctggctgagtcctctggcatccatggtgggtggtcgagccaagaatttgtggtatggagcttgtgtggcggcgctggtggccctgttagctgccgtgcgcttgtggcttcgccgctatggtaatctcaagagccccgagccacccatgctctttgtgcgctggggactgcccctaatggcattgggtactgctgcctactgggcattggcgtcgggggcagatgaggctcccccccgtctccgggtcctggtctctggggcatccatggtgctgcctcgggctgtagcagggctggctgcttcagggctcgcgctgctgctctggaagcctgtgacagtgctggtgaaggctggggcaggcgctccaaggaccaggactgtcctcactcccttctcaggcccccccacttctcaagctgacttggattatgtggtccctcaaatctaccgacacatgcaggaggagttccggggccggttagagaggaccaaatctcagggtcccctgactgtggctgcttatcagttggggagtgtctactcagctgctatggtcacagccctcaccctgttggccttcccacttctgctgttgcatgcggagcgcatcagccttgtgttcctgcttctgtttctgcagagcttccttctcctacatctgcttgctgctgggatacccgtcaccacccctggtccttttactgtgccatggcaggcagtctcggcttgggccctcatggccacacagaccttctactccacaggccaccagcctgtctttccagccatccattggcatgcagccttcgtgggattcccagagggtcatggctcctgtacttggctgcctgctttgctagtgggagccaacacctttgcctcccacctcctctttgcagtaggttgcccactgctcctgctctggcctttcctgtgtgagagtcaagggctgcggaagagacagcagcccccagggaatgaagctgatgccagagtcagacccgaggaggaagaggagccactgatggagatgcggctccgggatgcgcctcagcacttctatgcagcactgctgcagctgggcctcaagtacctctttatccttggtattcagattctggcctgtgccttggcagcctccatccttcgcaggcatctcatggtctggaaagtgtttgcccctaagttcatatttgaggctgtgggcttcattgtgagcagcgtgggacttctcctgggcatagctttggtgatgagagtggatggtgctgtgagctcctggttcaggcagctatttctggcccagcagaggtagcctagtctgtgattactggcacttggctacagagagtgctggagaacagtgtagcctggcctgtacaggtactggatgatctgcaagacaggctcagccatactcttactatcatgcagccaggggccgctgacatctaggacttcattattctataattcaggaccacagtggagtatgatccctaactcctgatttggatgcatctgagggacaaggggggcggtctccgaagtggaataaaataggccgggcgtggtgacttgcacctataatcccagcactttgggaggcagaggtgggaggattgcttggtcccaggagttcaagaccagcctgtggaacataacaagaccccgtctctactatttaaaaaaaagtgtaataaaatgataatataaaaaaaaaaa

SEQ ID NO: 412 - protein, 1089 aa, Homo sapiens
MQKASVLLFLAWVCFLFYAGIALFTSGFLLTRLELTNHSSCQEPPGPGSLPWGSQGKPGACWMASRFSRVVLVLIDALRFDFAQPQHSHVPREPPVSLPFLGKLSSLQRILEIQPHHARLYRSQVDPPTTTMQRLKALTTGSLPTFIDAGSNFASHAIVEDNLIKQLTSAGRRVVFMGDDTWKDLFPGAFSKAFFFPSFNVRDLDTVDNGILEHLYPTMDSGEWDVLIAHFLGVDHCGHKHGPHHPEMAKKLSQMDQVIQGLVERLENDTLLVVAGDHGMTTNGDHGGDSELEVSAALFLYSPTAVFPSTPPEEPEVIPQVSLVPTLALLLGLPIPFGNIGEVMAELFSGGEDSQPHSSALAQASALHLNAQQVSRFLHTYSAATQDLQAKELHQLQNLFSKASADYQWLLQSPKGAEATLPTVIAELQQFLRGARAMCIESWARFSLVRMAGGTALLAASCFICLLASQWAISPGFPFCPLLLTPVAWGLVGAIAYAGLLGTIELKLDLVLLGAVAAVSSFLPFLWKAWAGWGSKRPLATLFPIPGPVLLLLLFRLAVFFSDSFVVAEARATPFLLGSFILLLVVQLHWEGQLLPPKLLTMPRLGTSATTNPPRHNGAYALRLGIGLLLCTRLAGLFHRCPEETPVCHSSPWLSPLASMVGGRAKNLWYGACVAALVALLAAVRLWLRRYGNLKSPEPPMLFVRWGLPLMALGTAAYWALASGADEAPPRLRVLVSGASMVLPRAVAGLAASGLALLLWKPVTVLVKAGAGAPRTRTVLTPFSGPPTSQADLDYVVPQIYRHMQEEFRGRLERTKSQGPLTVAAYQLGSVYSAAMVTALTLLAFPLLLLHAERISLVFLLLFLQSFLLLHLLAAGIPVTTPGPFTVPWQAVSAWALMATQTFYSTGHQPVFPAIHWHAAFVGFPEGHGSCTWLPALLVGANTFASHLLFAVGCPLLLLWPFLCESQGLRKRQQPPGNEADARVRPEEEEEPLMEMRLRDAPQHFYAALLQLGLKYLFILGIQILACALAASILRRHLMVWKVFAPKFIFEAVGFIVSSVGLLLGIALVMRVDGAVSSWFRQLFLAQQR

SEQ ID NO: 413 - DNA, 1620 bp, Homo sapiens
  CDS (95)..(1309)
cagcctcctcacagctccccatagcctggacctgccggccctccctccaggaccgaggggctcccaagggaaactcaggcgtgtgctggtcccaatgtcagtgaaacccagctgggggcctggcccctcggagggggtcaccgcagtgcctaccagtgaccttggagagatccacaactggaccgagctgcttgacctcttcaaccacactttgtctgagtgccacgtggagctcagccagagcaccaagcgcgtggtcctctttgccctctacctggccatgtttgtggttgggctggtggagaacctcctggtgatatgcgtcaactggcgcggctcaggccgggcagggctgatgaacctctacatcctcaacatggccatcgcggacctgggcattgtcctgtctctgcccgtgtggatgctggaggtcacgctggactacacctggctctggggcagcttctcctgccgcttcactcactacttctactttgtcaacatgtatagcagcatcttcttcctggtgtgcctcagtgtcgaccgctatgtcaccctcaccagcgcctccccctcctggcagcgttaccagcaccgagtgcggcgggccatgtgtgcaggcatctgggtcctctcggccatcatcccgctgcctgaggtggtccacatccagctggtggagggccctgagcccatgtgcctcttcatggcaccttttgaaacgtacagcacctgggccctggcggtggccctgtccaccaccatcctgggcttcctgctgcccttccctctcatcacagtcttcaatgtgctgacagcctgccggctgcggcagccaggacaacccaagagccggcgccactgcctgctgctgtgcgcctacgtggccgtctttgtcatgtgctggctgccctatcatgtgaccctgctgctgctcacactgcatgggacccacatctccctccactgccacctggtccacctgctctacttcttctatgatgtcattgactgcttctccatgctgcactgtgtcatcaaccccatcctttacaactttctcagcccacacttccggggccggctcctgaatgctgtagtccattaccttcctaaggaccagaccaaggcgggcacatgcgcctcctcttcctcctgttccacccagcattccatcatcatcaccaagggtgatagccagcctgctgcagcagccccccaccctgagccaagcctgagctttcaggcacaccatttgcttccaaatacttcccccatctctcccactcagcctcttacacccagctgaggtagaggccagactcctccaacagtgaaggaaaaggcacaggtgagagtataggtgggagatttggggggatgtagaggggagggtcaaagcactcgtggtcaattttgaatctatcttaaaatactgaggtgtggagagagagacaggatcaggagcgatagagagcaggccctcagtgttgtactatttgtctcggtccttgtgtctaaggagcaatgcagaaaaaaaggtgaaataaatggaagagatagccatggaaaaaaaaaaaaaaaaaaaaaaaaaaaaaaaaaaaaaaaaaaaaaaaaaaa

SEQ ID NO: 414 - protein, 404 aa, Homo sapiens
MSVKPSWGPGPSEGVTAVPTSDLGEIHNWTELLDLFNHTLSECHVELSQSTKRVVLFALYLAMFVVGLVENLLVICVNWRGSGRAGLMNLYILNMAIADLGIVLSLPVWMLEVTLDYTWLWGSFSCRFTHYFYFVNMYSSIFFLVCLSVDRYVTLTSASPSWQRYQHRVRRAMCAGIWVLSAIIPLPEVVHIQLVEGPEPMCLFMAPFETYSTWALAVALSTTILGFLLPFPLITVFNVLTACRLRQPGQPKSRRHCLLLCAYVAVFVMCWLPYHVTLLLLTLHGTHISLHCHLVHLLYFFYDVIDCFSMLHCVINPILYNFLSPHFRGRLLNAVVHYLPKDQTKAGTCASSSSCSTQHSIIITKGDSQPAAAAPHPEPSLSFQAHHLLPNTSPISPTQPLTPS

SEQ ID NO: 415 - DNA, 4413 bp, Homo sapiens
  CDS (218)..(1246)
gtgaaggcggcgcagcgcggcgcgggaggcgtgctgggcgcggggctgcggtgcccagaggctgcggcattaggggctcggcgcccccgaccttccgcgtcccggggtggcggcggcggcggcggcggcggcgcgggcggcatatgatgctgagctggctgctccagaatgaaccacagctctgagaaggggaagtagaaacagctggcgccctgccatggcctgtgaaccacaggtggacccgggggccactggcccattgcccccctcctcccctggctggagtgccctgcctggagggagccctcctggctgggggcaagagctccacaatggccaggtcctcactgttctccggattgacaatacctgtgcacccatctccttcgacctgggagccgcagaagagcaactgcaaacttggggcatccaggtcccggctgaccagtacaggagcttggctgagagtgccctcttggagccccaagtgagaagatatatcatctacaactcgaggcctatgcggctggcctttgctgtggttttctatgtggtggtgtgggccaatatctactctaccagtcagatgtttgccttggggaaccactgggctggcatgctgctcgtgaccctggccgcggtgagcctgaccttgactcttgtgctggtctttgaaagacaccagaagaaggccaacaccaacacggacctgaggctggcagctgccaatggagccctcctgagacaccgggtgctgctgggggtgacagacacagtggaaggatgccagagtgtgattcagctttggtttgtctacttcgacctggagaactgtgtgcagtttttgtctgatcatgttcaagaaatgaagactagccaagagtccttgctgagaagcagattgagccagttgtgtgttgtcatggagactggggtgagccctgcaacagcggaggggcctgagaacttggaggatgctcctctcctgcccggcaattcttgtcctaacgagaggccactcatgcagactgagcttcatcagcttgttcctgaggctgagccggaggaaatggcccgccagctgctggcagtgtttggcggctactacatccggcttctagtgacctcccagctccctcaggcaatggggacacgacacacgaactctccgagaattccatgcccctgccagctcatagaagcctacatcctaggcacagggtgctgcccgttcctggcgaggtgacctagggatgaaggtactcatcttccttcaagactgagcagtcaggaaggcttcaggagcccaagatggccaatggggagccccaggtgaggagagaagcatctgggggcactccaaaaggggcctgtgatgtcagccactggggtgttgtgctcacttcagggcccagcacaaaaatccttgtttgacatctcatgctgaccccctggcctttgcagaagctgatggttacagagctagtcccaccaaagctactctctctgctgcttagaactgtggacacgtatggaaagactggacccccattgctttcattgttcagagaacccaggagacatgaagatgaccagactgggcaaattatgtgtccaaaacttggcctcagatgatgtttccatctccaaccccttcatgccagatggggaaactgaggctcagagaggatactgctctatgtggcattgccttgaacccctaaaattatcagacttcctttttccaatataaagaaaaaaagtaagttttcagaattctctcaatttttaagtttttctcccccatattttgtgaaaagcagtggtatgtgtacgtgttgtctaccagtacacaggctgcagaagacagagacagaagaaagagatcaagggcagataactgttgataggaatatttgagaaagattgatcctgtttgacttgaggacttattttgttcacaggcatgcacgcttgtggttgtggttttatattacagatgtagaacaatggttatgtttcccgacatgaacattgtcctggaatgaagtgtgatcagccacttgtggaattctttgaagagctcagaggcttccaagtgatctgctcctgaacaagtttgaagacctattgtttcatagacccaagaccaaacgcatctaaaggatccccagcccccaagacctagcctttgtctgcgattttggcttcatctcccacaaaacccctttatgagttcacgctctttcctggactgacatacctattcctttccatttgttggactcctattcatgcttcaaagtccagctttcttaagcccttctttaggaagccttcccacacagccaaccctgctgctctctgcctcctttaaattcttgatacagctgctgcttgttctgatgttttatggtattgattctgttttcctgtgtatatgccagtttttctagctagactgtaaactccttaaggacagagactacaccttgtactttttgtgcatgacctggacctgctaaggaaaaaaaaatcttgtggattgattgctttgccatccccacagcagcttttgcaaattgctttccaaactcacttgaatgatgacattgctgtggacctgggttctggacctgatctgccacttcaagctgtgtaatttttggcaagttgctttctttgcctggtcctcagtttgcccatcaatataatgggtggattggatgatttttttttttttaattgagatggagtcttgcactgtcacccaggctggagtgcagtggcgcgatcttggctcactgcaacccccgccacctaggttcaagtgattctcatgcctcagcctcccaagtagctgggactacaggtgtgcaccactactcctggatatttttttgtgtttttagtagagatggggtttcgccatgttggccaagctggtcttgaactcctgacctcaggtgatccacccgcctcgggctcccaaagtgctgggattacagacgtgaggcaccacaaccagcctggatgattcttaagggcccttctaggaccaaagttctgggaatttctagcttattctgccccctcatagcccttggcctatctatctttatccacatgcagaaacatctggcaaccccacatggctgagatgacctggtcctaggacacccttggacagaagactggcctacctagcagacctggatttttcttcctgatctgctgcttccaagttgtgtgaccttggctaagtcacttaacctttctgattgtcatttcgctttttaataaagtgggtctggtgaacaagaaatgtaataaacacgtggcttgccattcaagagatgagtctgaccattcactttctgtgtgccagagaagagagatcatgggtatagaccagcccctggaaaggctgctttggtcaaggctgagagcagctttgctcaaggaaattattcacgaaggtgaccactgtctttctgacctggcacagaggaaatgttggctgtgaatgtgaccaatagaaagaagcccgtatttctcagtcagtcctagaaccccggtaagtaattaacagagaataaaaatgtgtttgttaaatgacaaagcagcagtttttcaattgtaaggtctgcttgagagcctttgatgtgtgtttcttttcctgacttttcctttctttagaatttttgatggtctcacctggtgggtggggctttcagggtatgcccacaatgtacatttctcggcatctgtgcctcagtttcctcatttataaaatccctatgatctctgtctcacctactttacagggttgctgtgaagatcgcatactacacacaggaatgctcatcagtttttaaattttatttaatttttatttatttttttttaaatgtaattttttcagagagataaggtcttgctatgttacccagcctagtcttgaactcctggcctcaagtgatcctcctgccttggcctcccatgctgctgggattacaggtgtgaactaccatgcccagccagctcctaagtcttaaggctctgtgttagtgatagatgtggccatggtgtaggcagtgcaatgtcttcgagtgagagtgaaggtggtaactcattgcatggattctagagttctgtttattctaatccaagttcttccacttaaaaacaatgttcttcctctcattgagtctcattcctcatctataggatgggaataagagcatgtacctggcaggttgttgtaaggattaaatggtgtaaaaaaatgtcaagtgcttgcaactttgaataccaaacttgagtgaaagctcaataaattgttacttaaaaaataaaaaaaaaaaaaaaaaaaaaaaaaaaaaaaaaaaaaaaaaaaaaaaaaaaaaaaaa

SEQ ID NO: 416 - protein, 342 aa, Homo sapiens
MACEPQVDPGATGPLPPSSPGWSALPGGSPPGWGQELHNGQVLTVLRIDNTCAPISFDLGAAEEQLQTWGIQVPADQYRSLAESALLEPQVRRYIIYNSRPMRLAFAVVFYVVVWANIYSTSQMFALGNHWAGMLLVTLAAVSLTLTLVLVFERHQKKANTNTDLRLAAANGALLRHRVLLGVTDTVEGCQSVIQLWFVYFDLENCVQFLSDHVQEMKTSQESLLRSRLSQLCVVMETGVSPATAEGPENLEDAPLLPGNSCPNERPLMQTELHQLVPEAEPEEMARQLLAVFGGYYIRLLVTSQLPQAMGTRHTNSPRIPCPCQLIEAYILGTGCCPFLAR

SEQ ID NO: 417 - DNA, 954 bp, Homo sapiens
  CDS (1)..(954)
atggcaggaagaatgtctacgtctaatcacacccagttccatccttcttcattcctactgctgggtatcccagggctagaagatgtgcacatttggattggagtcccttttttctttgtgtatcttgttgcactcctgggaaacactgctctcttgtttgtgatccagactgagcagagtctccatgagcctatgtactacttcctggccatgttggattccattgacctgggcttgtctacagccaccatccccaaaatgttgggcatcttctggttcaataccaaagaaatatcttttggaggctgcctttctcacatgttcttcatccatttcttcactgctatggagagcattgtgttggtggccatggcctttgaccgctacattgccatttgcaaacctcttcggtacaccatgatcctcaccagcaaaatcatcagcctcattgcaggcattgctgtcctgaggagcctgtacatggttgttccactggtgtttctccttctgaggctgcccttctgtgggcatcgtatcatccctcatacttattgtgagcacatgggcattgcccgtctggcctgtgccagcatcaaagtcaacattaggtttggccttggcaacatatctctcttgttactggatgttatccttattattctctcctatgtcaggatcctgtatgctgtcttctgcctgccctcctgggaagctcgactcaaagctctcaacacctgtggttctcatattggtgttatcttagccttttttacaccagcatttttttcattcttgacacatcgttttggccataatatcccacagtatatacatattatattagccaacctgtatgtggttgtcccaccagccctcaatcctgtaatctatggagtcaggacaaagcagattcgagagagagtgctgaggatttttctcaagaccaatcactaa

SEQ ID NO: 418 - protein, 317 aa, Homo sapiens
MAGRMSTSNHTQFHPSSFLLLGIPGLEDVHIWIGVPFFFVYLVALLGNTALLFVIQTEQSLHEPMYYFLAMLDSIDLGLSTATIPKMLGIFWFNTKEISFGGCLSHMFFIHFFTAMESIVLVAMAFDRYIAICKPLRYTMILTSKIISLIAGIAVLRSLYMVVPLVFLLLRLPFCGHRIIPHTYCEHMGIARLACASIKVNIRFGLGNISLLLLDVILIILSYVRILYAVFCLPSWEARLKALNTCGSHIGVILAFFTPAFFSFLTHRFGHNIPQYIHIILANLYVVVPPALNPVIYGVRTKQIRERVLRIFLKTNH

SEQ ID NO: 419 - DNA, 911 bp, Homo sapiens
  CDS (327)..(770)
tgggagtcggccatcatgctggccccggaggccgttagcttagtcatggctctaaatatgtacctgcaatcggatgttgaggatcaccgagcccgcgacgtagaagtacgggaagttcatgcgcagctgccaggccagctcgaagaaggcgagcagggtgcgggagagccccttgcagaagacgccgtacgaggttctccagcatttggctcaaggccccaagggcacatgtgacaagaaggcgccagctttttaaacattggaagttcttctgtgtcagttctgtgacagaacatttacttaacacatcatgaaggctagtttggatgtggaggggaatagactccatctatccatatgagctgctgcagaagaatattttgcctgctggaacctgctgtatctactcaagagtggaagttttcacagatgtgaactatgaagactttactttcaccataccagatgtagaggactcaagtcagagaccagatcagggaccccagagacctcctcctgaaggactcctacctagaccccctggtgatagtggtaaccaagatgatggtcctcagcagagaccaccaaaaccaggaggccatcaccgccatcctcccccacctccttttcaaaatcagcaacgaccaccccgacgaggacaccgtcaactctctctaccccgatttccttctgtcagcctgcaggaagcatcatcattcttccagagggacagaccagcaagacatccccaggagcaaccactctggtaatctagaattcagtggcagaaaataaataagaagataacttccttcagaaagccatgacattgaaataatgtggtcataactctttcttcagtataccaataaaatattaatagcatgcaaaaaaaaaaaaaaaaaaaaaaa

SEQ ID NO: 420 - protein, 147 aa, Homo sapiens
MWRGIDSIYPYELLQKNILPAGTCCIYSRVEVFTDVNYEDFTFTIPDVEDSSQRPDQGPQRPPPEGLLPRPPGDSGNQDDGPQQRPPKPGGHHRHPPPPPFQNQQRPPRRGHRQLSLPRFPSVSLQEASSFFQRDRPARHPQEQPLW

SEQ ID NO: 421 - DNA, 585 bp, Homo sapiens
  CDS (1)..(585)
atgctctcctccacactcagggtggctgtggtgtgcgtgagcaatgtcaacaggagcatggaggcccacagcatcctcaggaaaaaagggctaagtgtccggtcttttggaactgaatctcatgtgaggctaccaggaccaagacccaatcgtcctgtagtttatgattttgcaacaacatataaggagatgtacaatgacctcctcaggaaagatagagaatgctacacccgcaacggaatcttacacatcttgggaagaaatgagagaatcaagcccggtccagaaagatttcaggagtgcactgatttctttgatgtcatcttcacctgtgaggagagtgtctatgacacagtggtggaagatctgtgttccagagaacagcagacctttcagcctgtgcacgtgatcaacatggaaatccaagataccctggaagatgccaccctgggagctttcctcatctgtgagatttgccagtgcctgcagcagtcagacgacatggaagacaatctggaggagctgctcttgcaaatggaggagaaggcaggaaaaagctttcttcacaccgtctgcttctactga

SEQ ID NO: 422 - protein, 194 aa, Homo sapiens
MLSSTLRVAVVCVSNVNRSMEAHSILRKKGLSVRSFGTESHVRLPGPRPNRPVVYDFATTYKEMYNDLLRKDRECYTRNGILHILGRNERIKPGPERFQECTDFFDVIFTCEESVYDTVVEDLCSREQQTFQPVHVINMEIQDTLEDATLGAFLICEICQCLQQSDDMEDNLEELLLQMEEKAGKSFLHTVCFY

SEQ ID NO: 423 - DNA, 599 bp, Homo sapiens
  CDS (237)..(443)
cccggcagtgcacacacacggcaggggcgggcgacagatgcagtgcgtgcgccggagcccaagcgcacaaacggaaagagcgggcgcggtgcgcaggggcgggcgcccagcgggcttggcatgcgcgcccccgcccgaggctataaaagcatcgccacctgctgccactagccaagccgcgcgtccagttgcttggagaagcccgttcaccgcctccagctgctgctctcctcgacatggaccctgagacctgcccctgcccttctggtggctcctgcacctgcgcggactcctgcaagtgcgagggatgcaaatgcacctcctgcaagaagagctgctgctcctgctgccctgcggagtgtgagaagtgtgccaaggactgtgtgtgcaaaggcggagaggcagctgaggcagaagcagagaagtgcagctgctgccagtgagaaggcacccctccgtgtggagcacgtggagatagtgccaggtggctcagtgccacctatgcctgtggtgaagtgtggctggtgtccccttcccctgctgaccttggaggaatgacaataaatcccatgaacagcatgaaaaaaaaaaaaaaaaaa

SEQ ID NO: 424 - protein, 68 aa, Homo sapiens
MDPETCPCPSGGSCTCADSCKCEGCKCTSCKKSCCSCCPAECEKCAKDCVCKGGEAAEAEAEKCSCCQ

SEQ ID NO: 425 - DNA, 3487 bp, Homo sapiens
  CDS (43)..(1530)
ttgctccacagtcgcgtgctagactccggacccgccagtggtatggctgagccgactagtgatttcgagactcctatcgggtggcatgcgtctcccgagctgactcccacgttagggcccctgagcgacactgccccgccgcgggacagctggatgttctgggcaatgctgccgccaccgccaccaccacttacgtcctcgcttcccgcagccgggtcaaagccttcctctgagtcgcagccccccatggaggcccagtctctccccggggctccgccccccttcgacgcccagattcttcccggggcgcaaccccccttcgacgcccagtctccccttgattctcagcctcaacccagcggccagccttggaatttccatgcttccacatcgtggtattggagacagtcttctgataggtttcctcggcatcagaagtccttcaaccctgcagttaaaaattcttattatccacgaaagtatgatgcaaaattcacagacttcagcttacctcccagtagaaaacagaaaaaaaagaaaagaaaggaaccagtttttcactttttttgtgatacctgtgatcgtggttttaaaaatcaagaaaagtatgacaaacacatgtctgaacatacaaaatgccctgaattagattgctcttttactgcacacgagaagattgtccagttccattggagaaatatgcatgctcctggcatgaagaagatcaagttagacactccagaggaaattgcacggtggagggaagaaagaaggaaaaactatccaactctggccaatattgaaaggaagaagaagttaaaacttgaaaaggagaagagaggagcagtattgacaacaacacaatatggcaagatgaaggggatgtccagacattcacaaatggcaaagatcagaagtcctggcaagaatcacaaatggaaaaacgacaattctagacagagagcagtcactggatcaggcagtcacttgtgtgatttgaagctagaaggtccaccggaggcaaatgcagatcctcttggtgttttgataaacagtgattctgagtctgataaggaggagaaaccacaacattctgtgatacccaaggaagtgacaccagccctatgctcactaatgagtagctatggcagtctttcagggtcagagagtgagccagaagaaactcccatcaagactgaagcagacgttttggcagaaaaccaggttcttgatagcagtgctcctaagagtccaagtcaagatgttaaagcaactgttagaaatttttcagaagccaagagtgagaaccgaaagaaaagctttgaaaaaacaaaccctaagaggaaaaaagattatcacaactatcaaacgttattcgaaccaagaacacaccatccatatctcttggaaatgcttctagctccggacattcgacatgaaagaaatgtgattttgcagtgtgttcggtacatcatcaaaaaagacttttttggactggatactaattctgcgaaaagtaaagatgtataggcatctggtgtttcagcatacataactgaagcatgtgaaacagtatcatcctcgttagtagaggaaaaccaaaacccttttttccgtcaaaattggatttgtaattaaattgtaagcctcgtaggatgtatgttggaattttaagtctttcctttggttctatgcaaataaaaaaataactgattttttaagactgtgtctgtattgttgggattgaatctagtatttgctgggagaattttttctttgtatttattttaatgtattgttctcatgtaagaatgactgatgttgtgttagttaagaattgaagataggtttagcagtaaagaagaaagcttttaaaaggattgattcagctaagcaaagttgggcagagaaatacagccattttgtttttaatgcagaaaaggaagatgttctgtagcaagggggaatattttaaaaataaaccagatcaaattaatacaatcagaaggtttcgaaatgtaaatattccttatttaagacatgtttaaattcacctactagcacgacttacatagctcaaatattgaatgtttaaaatattaatacagatggggcctctttatgtttagataaaattgaagtacttaattgaagctttttaaaaattgtaaagtaaatgaaagctattgagatctttttgtctcctataataccagggaatttgagcttgtgttctagtcattgtactagctgtagctattggtctgtccttttgacatacagctaaaagggactaaatttgtaaaaaattagtttgttatagttgaagattaacttttcctaacattgtgattattgaagttcatgaatcttgctgtcaaggaagaaaggtaagaaagctgatagctcctccatgttggtaaaatcctctccagaatcttggaacacctggcatgtgaccctagtgacgtcacagacctgagatgaagattcatgtttagccagtgttttccagccttgtacccaccatacagatctgtttattctgtttcaccctactcctccagtgagccccatattttgggaaattatctgccttatacattaactaattcaattcatgtaacactgttgagtgcttactctttgtacctctattgtgcctatattaaaggtatacaaataaataaggccatgtctgacttcaaggaactcagtttaattttgatatattcaaagatgtgattcccaaccaactcaggatgaagtaactagtgttacaactgagttgatattctaaaatataacacagtttgtacttttattactagttagcatacacattttataggcttatgggttaataaatgaattcatggactcctggactactttcattgatgaccatatctccagggatgttgttgatccccacactgccttaaggtatattatagaaacagttttattttccatttttcttgtttcctgataataaatgtatttaggactgaaaatactcctgagtactcccttggctgtatgtctgacagtctttagctatggtgactattgtttatttttaatgggtatttcagattccaagtgtatttaaaatttctaaggagatataatatagcctgtatggtttctactttatggaattatatggtcaatatttgtaaatattctatgagttttgggtgggtagaggggtgctttgcctgttttgggtacaggtttttttggatttagcttgttaattgttcaaactttctgccttctacattcctatcttattgttcgtttaatcagtttctgaaatgtaagcattacatgactattggtgagttgtgccttttataactgaaatactttactttttctcatatcctctataattgacttctattttccttaatcaaaccagctctgggaaatttaatacatttatattaattgagattattaaaacatttggactatt

SEQ ID NO: 426 - protein, 495 aa, Homo sapiens
MAEPTSDFETPIGWHASPELTPTLGPLSDTAPPRDSWMFWAMLPPPPPPLTSSLPAAGSKPSSESQPPMEAQSLPGAPPPFDAQILPGAQPPFDAQSPLDSQPQPSGQPWNFHASTSWYWRQSSDRFPRHQKSFNPAVKNSYYPRKYDAKFTDFSLPPSRKQKKKKRKEPVFHFFCDTCDRGFKNQEKYDKHMSEHTKCPELDCSFTAHEKIVQFHWRNMHAPGMKKIKLDTPEEIARWREERRKNYPTLANIERKKKLKLEKEKRGAVLTTTQYGKMKGMSRHSQMAKIRSPGKNHKWKNDNSRQRAVTGSGSHLCDLKLEGPPEANADPLGVLINSDSESDKEEKPQHSVIPKEVTPALCSLMSSYGSLSGSESEPEETPIKTEADVLAENQVLDSSAPKSPSQDVKATVRNFSEAKSENRKKSFEKTNPKRKKDYHNYQTLFEPRTHHPYLLEMLLAPDIRHERNVILQCVRYIIKKDFFGLDTNSAKSKDV

SEQ ID NO: 427 - DNA, 2320 bp, Homo sapiens
  CDS (265)..(1929)
gtgagcgcctgagagtctttttgcctttcagagttaaggcctcactggcctgggaaaataattgctgccttttgcatccgcgttggctccgtccccaggatcttcccggttcagggacctggcgatttctgagtgttccggaatcccaataaccctgtttaaagaggaatggagattgccactgtccatttagattaatgaggtgtcctgaagtgatggtgacatcaatgaaaggagggttctgacacgttctcacctcgcgggatggcagctgctgatttgtcccatggacattatctttctggggacccagtttgccttcatgaagaaaagacaccagcaggaagaatagtggctgactgcctaacagattgttatcaggattcagtgacctttgacgatgtggctgtggacttcacccaggaggagtggactttactggactcaactcagagaagcctctacagtgacgtgatgctggagaactacaagaacctggccacagtaggaggtcagatcatcaaacccagtctaatctcttggttggaacaagaagagtcaaggacagttcagggaggagttctccaaggatgggaaatgcgacttgaaacccagtggtctatacttcagcaggactttttgaggggtcagacatccattgggatacaattggaaggaaaacacaatggaagggaactctgtgactgtgagcaatgtggagaagtcttcagtgaacactcatgccttaagacgcacgtgagaactcaaagtacagggaacactcatgactgtaatcagtatggaaaagatttccttaccctgtgtgagaaaacctctactggtgagaaactttctgagtttaatcagagtgaaaaaatcttcagcctgacaccaaatattgtataccagagaactagcacacaagaaaagtcatttgaatgtagtcactgtggaaaatccttcattaatgagtcataccttcaggcacatatgagaactcacaatggagaaaaactctacgaatggaggaattatgggccaggttttattgactctacaagcctttctgtgcttatagaaaccctcaatgcaaaaaagccctacaaatgtaaggaatgtggaaaaggctatagatacccagcctacctcagtattcacatgcgaacccacactggggagaaaccatatgaatgtaaggaatgtgggaaagccttcaattattccaactcatttcagatacatggaagaactcacactggagagaaaccctatgtatgtaaggaatgtgggaaagccttcactcagtactcgggccttagtatgcatgtacgatctcacagtggagacaagccctatgaatgtaaggaatgtgggaaatccttccttacatcctcacgccttattcaacatataagaactcacactggagagaagccttttgtatgtgttgaatgtgggaaagcctttgcagtttcctcaaatcttagtggacatttgagaactcacactgaagagaaggcctgtgagtgtaagatatgtgggaaagtatttgggtatccctcatgtcttaataatcacatgcgaacgcacagtgcccagaaaccatacacctgtaaggaatgtgggaaggcttttaactattccacccaccttaaaattcacatgcgaatccacactggagaaaaaccctatgagtgtaaacaatgtggaaaggccttcagtcattccagttcatttcaaatacatgaaaggactcacactggagagaaaccctatgaatgcaaggagtgtgggaaagccttcacgtgttccagttcctttagaattcatgaaaaaactcacacagaagagaaaccctataaatgtcagcaatgcgggaaagcttacagtcatccccgttcacttcgaagacatgaacaaattcactagtgagaaactgtccatgtaataaatgtgggaaagctctcatttgttccagttcactttaaagacatgaatgaactcactctggagagaagaagctgcatgaaaattacttaattcctgtaatcccagcattttgagaggctgaggtgggtggatcacttgaggtcaggagtttgagaccaccctggccaacatggtgaaaccttgtctctactgaaaatacaaaaaatttagccaggtgtggtgggcacctgtaatcccagctacttgggaggctgaggcaagtgaatcacttgaacccaggaagcagaggttgcagtgagcagagatcatgccactgcactccagcctgggcgatggagtgagactccatctcaaaaaaaaaaaaaaaaaa

SEQ ID NO: 428 - protein, 554 aa, Homo sapiens
MAAADLSHGHYLSGDPVCLHEEKTPAGRIVADCLTDCYQDSVTFDDVAVDFTQEEWTLLDSTQRSLYSDVMLENYKNLATVGGQIIKPSLISWLEQEESRTVQGGVLQGWEMRLETQWSILQQDFLRGQTSIGIQLEGKHNGRELCDCEQCGEVFSEHSCLKTHVRTQSTGNTHDCNQYGKDFLTLCEKTSTGEKLSEFNQSEKIFSLTPNIVYQRTSTQEKSFECSHCGKSFINESYLQAHMRTHNGEKLYEWRNYGPGFIDSTSLSVLIETLNAKKPYKCKECGKGYRYPAYLSIHMRTHTGEKPYECKECGKAFNYSNSFQIHGRTHTGEKPYVCKECGKAFTQYSGLSMHVRSHSGDKPYECKECGKSFLTSSRLIQHIRTHTGEKPFVCVECGKAFAVSSNLSGHLRTHTEEKACECKICGKVFGYPSCLNNHMRTHSAQKPYTCKECGKAFNYSTHLKIHMRIHTGEKPYECKQCGKAFSHSSSFQIHERTHTGEKPYECKECGKAFTCSSSFRIHEKTHTEEKPYKCQQCGKAYSHPRSLRRHEQIH

SEQ ID NO: 429 - DNA, 7805 bp, Homo sapiens
  CDS (78)..(5588)
ccagcaccccggggctgcgcactgcagctccccaggccacccaccacccttctggtctctgagcccaggatgcgaggatggccagaccatctctgtgcaccctggtgcctctgggccctgagtgcttgcgccccttcacccgggagtcactggcagccatagaacagcgggcggtggaggaggaggcccggctgcagcggaataagcagatggagattgaggagcccgaacggaagccacgaagtgacttggaggctggcaagaacctacccatgatctacggagaccccccgccggaggtcatcggcatccccctggaggacctggatccctactacagcaataagaagaccttcatcgtactcaacaagggcaaggccatcttccgcttctccgccacacctgctctctacctgctgagccccttcagcgtagtcaggcgcggggccatcaaggtgctcatccatgcgctgttcagcatgttcatcatgatcaccatcttgaccaactgcgtattcatgaccatgagtgacccgcctccctggtccaagaatgtggagtacaccttcacagggatctacacctttgagtccctcatcaagatactggcccgaggcttctgtgtcgacgacttcacattcctccgggacccctggaactggctggacttcagtgtcatcatgatggcgtacctgacagagtttgtggacttgggcaacatctcagccctgaggaccttccgggtgctgcgggccctcaaaaccatcacggtcatcccagggctgaagacgatcgtgggggccctgatccagtcggtgaaaaagctgtcggatgtgatgatcctcactgtcttctgcctgagcgtctttgcgctggtaggactgcagctcttcatgggaaacctgaggcagaagtgtgtgcgctggcccccgccgttcaacgacaccaacaccacgtggtacagcaatgacacgtggtacggcaatgacacatggtatggcaatgagatgtggtacggcaatgactcatggtatgccaacgacacgtggaacagccatgcaagctgggccaccaacgatacctttgattgggacgcctacatcagtgatgaagggaacttctacttcctggagggctccaacgatgccctgctctgtgggaacagcagtgatgctgggcactgccctgagggttatgagtgcatcaagaccgggcggaaccccaactatggctacaccagctatgacaccttcagctgggccttcttggctctcttccgcctcatgacacaggactattgggagaacctcttccagctgacccttcgagcagctggcaagacctacatgatcttcttcgtggtcatcatcttcctgggctctttctacctcatcaatctgatcctggccgtggtggccatggcatatgccgagcagaatgaggccaccctggccgaggataaggagaaagaggaggagtttcagcagatgcttgagaagttcaaaaagcaccaggaggagctggagaaggccaaggccgcccaagctctggaaggtggggaggcagatggggacccagcccatggcaaagactgcaatggcagcctggacacatcgcaaggggagaagggagccccgaggcagagcagcagcggagacagcggcatctccgacgccatggaagaactggaagaggcccaccaaaagtgcccaccatggtggtacaagtgcgcccacaaagtgctcatatggaactgctgcgccccgtggctgaagttcaagaacatcatccacctgatcgtcatggacccgttcgtggacctgggcatcaccatctgcatcgtgctcaacaccctcttcatggccatggaacattaccccatgacggagcactttgacaacgtgctcactgtgggcaacctggtcttcacaggcatcttcacagcagagatggttctgaagctgattgccatggacccctacgagtatttccagcagggttggaatatcttcgacagcatcatcgtcaccctcagcctggtagagctaggcctggccaacgtacagggactgtctgtgctacgctccttccgtctgctgcgggtcttcaagctggccaagtcgtggccaacgctgaacatgctcatcaagatcattggcaattcagtgggggcgctgggtaacctgacgctggtgctggctatcatcgtgttcatcttcgccgtggtgggcatgcagctgtttggcaagagctacaaggagtgcgtgtgcaagattgccttggactgcaacctgccgcgctggcacatgcatgatttcttccactccttcctcatcgtcttccgcatcctgtgcggggagtggatcgagaccatgtgggactgcatggaggtggccggccaagccatgtgcctcaccgtcttcctcatggtcatggtcatcggcaatcttgtggtcctgaacctgttcctggctctgctgctgagctccttcagcgccgacagtctggcagcctcggatgaggatggcgagatgaacaacctgcagattgccatcgggcgcatcaagttgggcatcggctttgccaaggccttcctcctggggctgctgcatggcaagatcctgagccccaaggacatcatgctcagcctcggggaggctgacggggccggggaggctggagaggcgggggagactgcccccgaggatgagaagaaggagccgcccgaggaggacctgaagaaggacaatcacatcctgaaccacatgggcctggctgacggccccccatccagcctcgagctggaccaccttaacttcatcaacaacccctacctgaccatacaggtgcccatcgcctccgaggagtccgacctggagatgcccaccgaggaggaaaccgacactttctcagagcctgaggatagcaagaagccgccgcagcctctctatgatgggaactcgtccgtctgcagcacagctgactacaagccccccgaggaggaccctgaggagcaggcagaggagaaccccgagggggagcagcctgaggagtgcttcactgaggcctgcgtgcagcgctggccctgcctctacgtggacatctcccagggccgtgggaagaagtggtggactctgcgcagggcctgcttcaagattgtcgagcacaactggttcgagaccttcattgtcttcatgatcctgctcagcagtggggctctggccttcgaggacatctacattgagcagcggcgagtcattcgcaccatcctagaatatgccgacaaggtcttcacctacatcttcatcatggagatgctgctcaaatgggtggcctacggctttaaggtgtacttcaccaacgcctggtgctggctcgacttcctcatcgtggatgtctccatcatcagcttggtggccaactggctgggctactcggagctgggacccatcaaatccctgcggacactgcgggccctgcgtcccctgagggcactgtcccgattcgagggcatgagggtggtggtgaacgccctcctaggcgccatcccctccatcatgaatgtgctgcttgtctgcctcatcttctggctgatcttcagcatcatgggtgtcaacctgtttgccggcaagttctactactgcatcaacaccaccacctctgagaggttcgacatctccgaggtcaacaacaagtctgagtgcgagagcctcatgcacacaggccaggtccgctggctcaatgtcaaggtcaactacgacaacgtgggtctgggctacctctccctcctgcaggtggccaccttcaagggttggatggacatcatgtatgcagccgtggactcccgggagaaggaggagcagccgcagtacgaggtgaacctctacatgtacctctactttgtcatcttcatcatctttggctccttcttcaccctcaacctcttcattggcgtcatcattgacaacttcaaccagcagaagaagaagttaggggggaaagacatctttatgacggaggaacagaagaaatactataacgccatgaagaagcttggctccaagaagcctcagaagccaattccccggccccagaacaagatccagggcatggtgtatgacctcgtgacgaagcaggccttcgacatcaccatcatgatcctcatctgcctcaacatggtcaccatgatggtggagacagacaaccagagccagctcaaggtggacatcctgtacaacatcaacatgatcttcatcatcatcttcacaggggagtgcgtgctcaagatgctcgccctgcgccagtactacttcaccgttggctggaacatctttgacttcgtggtcgtcatcctgtccattgtgggccttgccctctctgacctgatccagaagtacttcgtgtcacccacgctgttccgtgtgatccgcctggcgcggattgggcgtgtcctgcggctgatccgcggggccaagggcatccggacgctgctgttcgccctcatgatgtcgctgcctgccctcttcaacatcggcctcctcctcttcctggtcatgttcatctactccatcttcggcatgtccaactttgcctacgtcaagaaggagtcgggcatcgatgatatgttcaacttcgagaccttcggcaacagcatcatctgcctgttcgagatcaccacgtcggccggctgggacgggctcctcaaccccatcctcaacagcgggcccccagactgtgaccccaacctggagaacccgggcaccagtgtcaagggtgactgcggcaacccctccatcggcatctgcttcttctgcagctatatcatcatctccttcctcatcgtggtcaacatgtacatcgccatcatcctggagaacttcaatgtggccacagaggagagcagcgagccccttggtgaagatgactttgagatgttctacgagacatgggagaagttcgaccccgacgccacccagttcatcgcctacagccgcctctcagacttcgtggacaccctgcaggaaccgctgaggattgccaagcccaacaagatcaagctcatcacactggacttgcccatggtgccaggggacaagatccactgcctggacatcctctttgccctgaccaaagaggtcctgggtgactctggggaaatggacgccctcaagcagaccatggaggagaagttcatggcagccaacccctccaaggtgtcctacgagcccatcaccaccaccctcaagaggaagcacgaggaggtgtgcgccatcaagatccagagggcctaccgccggcacctgctacagcgctccatgaagcaggcatcctacatgtaccgccacagccacgacggcagcggggatgacgcccctgagaaggaggggctgcttgccaacaccatgagcaagatgtatggccacgagaatgggaacagcagctcgccaagcccggaggagaagggcgaggcaggggacgccggacccactatggggctgatgcccatcagcccctcagacactgcctggcctcccgcccctcccccagggcagactgtgcgcccaggtgtcaaggagtctcttgtctagcaggcagcatcggggtggcccactgagtctcggcatagtccccagagctcccccgtggtgcctgcacacagagtgagggaggagggctttgaatctgggactgtgcctggctccctgatgggggacaggatttggccacactggggctgacacccaggcccgagcgcctgcgttcccagaccatgggaaatgggaattgcgctcaggggctccatgctgggtctgaggcccctgcctccaagatttaacctgcaagttgctctgacctcctctgggccctgtcgcccctccttttggcctgggggaggtcagaacattcgaatctctgcccctcacttgaggaggagctggcctgcggtggagggatcagttgccccccatcaccagagtcttaagggtcactggcctctccccaggaagtggctcagacccctcagccccagcccagacaaagatgtcttaacctcagggagtgcagacacctaaccccagggcactgccagcccaccccctttgactctggggtgcagcttcacccaccaggccagctcaggaattccctggaaaagggaaatgtgactggttcagaaatagctcctcaaagcctcaaaacctgattggccactggatcctgctgctttgggctgggatggtgactcctgaaacctcttcctaggccacgtccaggtccgtagctcccctggctggctcctaggggaagagcagaaggaaggatgccacttgggaatgaattgtccttttctaggaagcacgggggagtgagacaggctgggtcctgccagctggatcgctgcacatggcctgagcatccagacctgagcgggagtcagggacctgctgctcagtaagaagattctcgccccttccctctctccctgcctcactcctccgtgagcaccaccagggctccaggagcctcatccagcctcagagatctcccttctcatctccccacgcccgtctctttctcacctttcccacctctctccccaaagtgatcctaagaatgtacagttgagctcaggttagatatttcgaccctggggcgtgcagcagggaaggcccaactggttcaggctcaaccttccaacttcctgtggcctgaagaagcacttctgctgcatcgctgttctgggcatggcagggccaggcctctgctggctcaggaggaggggtgagagacctgctcaggcgtcgctggatttattcacttgtgtgtgtacctgtggctgtgtgtctgcttgtatgcttttataggcctgtgtgtatagctgtgtgtgtgttcaagtgcgtgactgtatgtgtgtgtgtgaaccactgtgtactggagcctgcattatgcacgtgtctgggtatctttgtatatatgtgtatatatgtgtgccctggactgtttcaaggtccatggagtacggctggtgtgtcatactgtgcaggcctgtccctgggagtgttcccgtgcctgggagagtggacctgtgctgtgagtgtgtggatgcgtgtgaacgcatgtggtaaggtgtgtactcagggcattctgttggcctaagtgcctcttctttttcttcttgtttctcatgaaaagtttgattaaaattcaggaagcagcaaaaccttcaaaacaagacatgtatgtgtgcttgagtgtgtgaacacgtgtgtgtgtgtgcacatctacatgccatgcctatgggccagagttgtctttattgtccaccatgctctctcacctgctcccagtcctgcctgaacagccctctctctcactcccctctcctccccttcctgtttctcgttgtcacacccatggcctcagccctgctccctgcctcctgcctatgtctcctctatggaaggaggcctccactccttccatctcttccttcagaagtttcgtctaatgggggcagtctccccttcctggcacattgcccctctgccttgccctcctgggccctgggctggcacagcccctggagcctcagaaatctgtttgattggatattctcctcggactgtgtgcaggttgcagaggaagagtagatgagccgggtccggcctctccctgcctgtggcccctcccctgcagacggatgcccattcctgcctggtccagtggggaacaggtcccacgccaggccagcaggcgggctcctttgtacagttcttacaataaaccctccttggtgcctctgg

SEQ ID NO: 430 - protein, 1836 aa, Homo sapiens
MARPSLCTLVPLGPECLRPFTRESLAAIEQRAVEEEARLQRNKQMEIEEPERKPRSDLEAGKNLPMIYGDPPPEVIGIPLEDLDPYYSNKKTFIVLNKGKAIFRFSATPALYLLSPFSVVRRGAIKVLIHALFSMFIMITILTNCVFMTMSDPPPWSKNVEYTFTGIYTFESLIKILARGFCVDDFTFLRDPWNWLDFSVIMMAYLTEFVDLGNISALRTFRVLRALKTITVIPGLKTIVGALIQSVKKLSDVMILTVFCLSVFALVGLQLFMGNLRQKCVRWPPPFNDTNTTWYSNDTWYGNDTWYGNEMWYGNDSWYANDTWNSHASWATNDTFDWDAYISDEGNFYFLEGSNDALLCGNSSDAGHCPEGYECIKTGRNPNYGYTSYDTFSWAFLALFRLMTQDYWENLFQLTLRAAGKTYMIFFVVIIFLGSFYLINLILAVVAMAYAEQNEATLAEDKEKEEEFQQMLEKFKKHQEELEKAKAAQALEGGEADGDPAHGKDCNGSLDTSQGEKGAPRQSSSGDSGISDAMEELEEAHQKCPPWWYKCAHKVLIWNCCAPWLKFKNIIHLIVMDPFVDLGITICIVLNTLFMAMEHYPMTEHFDNVLTVGNLVFTGIFTAEMVLKLIAMDPYEYFQQGWNIFDSIIVTLSLVELGLANVQGLSVLRSFRLLRVFKLAKSWPTLNMLIKIIGNSVGALGNLTLVLAIIVFIFAVVGMQLFGKSYKECVCKIALDCNLPRWHMHDFFHSFLIVFRILCGEWIETMWDCMEVAGQAMCLTVFLMVMVIGNLVVLNLFLALLLSSFSADSLAASDEDGEMNNLQIAIGRIKLGIGFAKAFLLGLLHGKILSPKDIMLSLGEADGAGEAGEAGETAPEDEKKEPPEEDLKKDNHILNHMGLADGPPSSLELDHLNFINNPYLTIQVPIASEESDLEMPTEEETDTFSEPEDSKKPPQPLYDGNSSVCSTADYKPPEEDPEEQAEENPEGEQPEECFTEACVQRWPCLYVDISQGRGKKWWTLRRACFKIVEHNWFETFIVFMILLSSGALAFEDIYIEQRRVIRTILEYADKVFTYIFIMEMLLKWVAYGFKVYFTNAWCWLDFLIVDVSIISLVANWLGYSELGPIKSLRTLRALRPLRALSRFEGMRVVVNALLGAIPSIMNVLLVCLIFWLIFSIMGVNLFAGKFYYCINTTTSERFDISEVNNKSECESLMHTGQVRWLNVKVNYDNVGLGYLSLLQVATFKGWMDIMYAAVDSREKEEQPQYEVNLYMYLYFVIFIIFGSFFTLNLFIGVIIDNFNQQKKKLGGKDIFMTEEQKKYYNAMKKLGSKKPQKPIPRPQNKIQGMVYDLVTKQAFDITIMILICLNMVTMMVETDNQSQLKVDILYNINMIFIIIFTGECVLKMLALRQYYFTVGWNIFDFVVVILSIVGLALSDLIQKYFVSPTLFRVIRLARIGRVLRLIRGAKGIRTLLFALMMSLPALFNIGLLLFLVMFIYSIFGMSNFAYVKKESGIDDMFNFETFGNSIICLFEITTSAGWDGLLNPILNSGPPDCDPNLENPGTSVKGDCGNPSIGICFFCSYIIISFLIVVNMYIAIILENFNVATEESSEPLGEDDFEMFYETWEKFDPDATQFIAYSRLSDFVDTLQEPLRIAKPNKIKLITLDLPMVPGDKIHCLDILFALTKEVLGDSGEMDALKQTMEEKFMAANPSKVSYEPITTTLKRKHEEVCAIKIQRAYRRHLLQRSMKQASYMYRHSHDGSGDDAPEKEGLLANTMSKMYGHENGNSSSPSPEEKGEAGDAGPTMGLMPISPSDTAWPPAPPPGQTVRPGVKESLV

SEQ ID NO: 431 - DNA, 3006 bp, Homo sapiens
  CDS (54)..(416)
gtaaaataggctgcaatcaagttcacttccaaaggcggaattcatgggtacatatggtgtccacgtgtgtacacctgcagagttgtaacatgcgggcatttctcccctcagcccgccattctggcttcttaacttgcaccctaacagctcgacagaaccttggcgtccacaaaaaggacttgaggtgggacatggaagaacagggacccctcctggtttgtccacccagcccacacctccattcctcacccaacctaccacttcagagccgggaaaagacctcagagaacatccgctccgactctaccgaggctcagacaggacaacaagagtgtgctggacactgggaaatgtggtccaggagcagtcacagtccctacagacctcccacaaattaccgtaatgcaaagcagtgaacacttgggagagctccttcactcaccgactctcatcaggaaaatagtgatagcatgaacccctccagatggttttaggattaaaagagatacttgtgcaaagcctcagcatacgagtgctcagcccctgccgacatgagcaatgggcagcgcgtccagctgggttcctgccccatgagaagcacacagcctggtttggtaggtggggctccatcagggctgtttggatacctgggtggagcccacagaccagcccccaccttgtgtggttagggctttgctaggaaggcccatctgtgcgccatgaccttggaactcgatgtgagatctctggaccggcagcagcacctggaagcttgttggaaatgctgatctcaggtgggactccagaattcccgcatctgcacctgcactcccaaaatacctccccaccaggtgatccgaggccatggggcagtctgaagggcactgtgctggggcgtcccaccactagaaatccagtccggtaatctgaagatgtaagtgcccccaggaggagtgacggagtgacacaaatgacacaaggggaggggacttgtcaggtgtccactcctgactgcaagttcccagggcagaaggcaatgcccccacagggacttttccagacactccgagtgcacctgaattgcattttgagtgatgctacctgctaagcaggaagagccctccagagcctcgaaaagcagagtggaagtggtggtgcccaggacgcatgggctctgatgggaagagggaggtgggcctgagcatgggccttcttctccccaggtcagaggggcctggatgcccctggagggaacactgaggtcacctctggccaaatcttcctgttctgccagtacccagccctgttcagtgacgtcaagcttttgggtccctgtcctggggccctccacgctggccgggctgtgtagagacgcccttctctccactttattgggtccagattgttgtgtggcttctcccctcctctgcagcctggggtctgaaaacagcgatgccaacagacagacagatttccaaaagaaaggtccggctcagccaaggacaaaggggccttgcagaggctcctgggggtcagaaagctgagagtctaccgggcaggtgccttctccacccacaggcacaagctacaacagctttccaggaagtgcatccacatcgtccccaggtccagatgcccacatcgccctgcagggaccaagaccacactcgggctgcttggacaggatgtagctggtcactgttctggagctggcccctctgtagcctgtgacaatcagcttgagtctctctgccaagtctccgccttctgttcttcttgccgaccttgaagcagagttgacgtttcaggtttttccagcagacaaagctcactcaatctgatactgtggaggttgttaatttaacaaccaacccatcctcatgttgagaaaccagctccaaatgctcacctggctgtcagggatggggagcctcatcggtgaaagagggttgtgatggcataatttaaaccaaaagaggcattcgcggttgcccgtgttgcctcaggcctgctggcctcctgctgtgaacattttgggcaataccgtctctgccagtgacccccaattgtccacttgtctccagcaagatcgaaccatgtaagtgccatttctgacaagttgggtgaacgttggtttcaaatcatcagctctgcattcaagtgccctgctacaattctgcctcactctgtgggaataactgcctgcctgggcacgttgctgttgctgcctcccaaacggcagtttctggggtcccaggtcatccaggctggatgtggcttgggagagacctgtggcaccaggttggagggaggtctcacctctcctttctgagctgtggactgcagcttcaggaccctatggatgaggccgaatgtcatgaagataatggaatttggagtctcaacaaagccaagccacatgccagagattcaccacctggggcccaggatcataagtgtgcccttaagaggccaaacagtccacctgtctaccaactagacatttggtctcagacagcaagaaaggctgcgtttatgtcattagggggaacaccacggtcttcggcatgagagaggtgtaattctcaagttcatcagagctcggcttcccccatgaggggaaacaatttgccaggttgaagaacacacgctttgagggttctcagaggctgacacctgttgtgaatcttggaaactcaagccccagtgcaaacggccttgaaggaggtcgagcatcatggttccaacaagtgactcgctttgataacccgatgtgtaagcagaatcgcaatgcatccgtccttccctaatcatcacgtggctgtcatctggtcaatgaactgaggcccgaaggcttgagtcaaactggttttcaaggctgtgctcatgggatttatatgtttcttgagccctgttggaggctcttggcaggtctgaacattaaacatttcttttcttccttttgaaaaaaaaaaaaaaaaaaaaaaaaaaaaaaaaaaaaaaaaa

SEQ ID NO: 432 - protein, 120 aa, Homo sapiens
MVSTCVHLQSCNMRAFLPSARHSGFLTCTLTARQNLGVHKKDLRWDMEEQGPLLVCPPSPHLHSSPNLPLQSREKTSENIRSDSTEAQTGQQECAGHWEMWSRSSHSPYRPPTNYRNAKQ

SEQ ID NO: 433 - DNA, 2466 bp, Homo sapiens
  CDS (231)..(1028)
ggctgagtggtttgctccttcccctctctctgggaggctgagcaggggtgccgggttgctcaggccatgggagccacacctgttattgctgcctctgatttgtgtgacactgagaagcccacaggcctgtccctccaactcggtggaccctctctgtgtgcatttggtgtgtgagccagctctgagaagggttcagaagccactggaggcatctggggacctcagcttccatgccatctctgcctcactcccacagggtaatgttggactcggtgacacacagcaccttcctgcctaatgcatccttctgcgatcccctgatgtcgtggactgatctgttcagcaatgaagagtactaccctgcctttgagcatcagacagcctgtgactcatactggacatcagtccaccctgaatactggactaagcgccatgtgtgggagtggctccagttctgctgcgaccagtacaagttggacaccaattgcatctccttctgcaacttcaacatcagtggcctgcagctgtgcagcatgacacaggaggagttcgtcgaggcagctggcctctgcggcgagtacctgtacttcatcctccagaacatccgcacacaaggttactccttttttaatgacgctgaagaaagcaaggccaccatcaaagactatgctgattccaactgcttgaaaacaagtggcatcaaaagtcaagactgtcacagtcatagtagaacaagcctccaaagttctcatctatgggaatttgtacgagacctgcttctatctcctgaagaaaactgtggcattctggaatgggaagatagggaacaaggaatttttcgggtggttaaatcggaagccctggcaaagatgtggggacaaaggaagaaaaatgacagaatgacatatgaaaagttgagcagagccctgagatactactataaaacaggaattttggagcgggttgaccgaaggttagtgtacaaatttggaaaaaatgcacacgggtggcaggaagacaagctatgatctgctccaggcatcaagctcattttatggatttctgtcttttaaaacaatcagattgcaatagacattcgaaaggcttcattttcttctctttttttttaacctgcaaacatgctgataaaatttctccacatctcagcttacatttggattcagagttgttgtctacggagggtgagagcagaaactcttaagaaatcctttcttctccctaaggggatgaggggatgatcttttgtggtgtcttgatcaaactttattttcctagagttgtggaatgacaacagcccatgccattgatgctgatcagagaaaaactattcaattctgccattagagacacatccaatgctcccatcccaaaggttcaaaagttttcaaataactgtggcagctcaccaaaggtgggggaaagcatgattagtttgcaggttatggtaggagagggtgagatataagacatacatactttagattttaaattattaaagtcaaaaatccatagaaaagtatccctttttttttttttgagacgggttctcactatgttgcccagggctggtcttgaactcctatgctcaagtgatcctcccacctcggcctcccaaagtactgtgattacaagcgtgagccacggcacctgggcagaaaagtatcttaattaatgaaagagctaagccatcaagctgggacttaattggatttaacataggttcacagaaagtttcctaaccagagcatctttttgaccactcagcaaaacttccacagacatccttctggacttaaacacttaacattaaccacattattaattgttgctgagtttattcccccttctaactgatggctggcatctgatatgcagagttagtcaacagacactggcatcaattacaaaatcactgctgtttctgtgattcaagctgtcaacacaataaaatcgaaattcattgattccatctctggtccagatgttaaacgtttataaaaccggaaatgtcctaacaactctgtaatggcaaattaaattgtgtgtcttttttgttttgtctttctacctgatgtgtattcaagcgctataacacgtatttccttgacaaaaatagtgacagtgaattcacactaataaatgttcataggttaaagtctgcactgacattttctcatcaatcactggtatgtaagttatcagtgactgacagctaggtggactgcccctaggacttctgtttcaccagagcaggaatcaagtggtgaggcactgaatcgctgtacaggctgaagacctccttattagagttgaacttcaaagtaacttgttttaaaaaatgtgaattactgtaaaataatctattttggattcatgtgttttccaggtggatatagtttgtaaacaatgtgaataaagtatttaacatgtaaaaaaaaaaaaaaa

SEQ ID NO: 434 - protein, 265 aa, Homo sapiens
MPSLPHSHRVMLDSVTHSTFLPNASFCDPLMSWTDLFSNEEYYPAFEHQTACDSYWTSVHPEYWTKRHVWEWLQFCCDQYKLDTNCISFCNFNISGLQLCSMTQEEFVEAAGLCGEYLYFILQNIRTQGYSFFNDAEESKATIKDYADSNCLKTSGIKSQDCHSHSRTSLQSSHLWEFVRDLLLSPEENCGILEWEDREQGIFRVVKSEALAKMWGQRKKNDRMTYEKLSRALRYYYKTGILERVDRRLVYKFGKNAHGWQEDKL

SEQ ID NO: 435 - DNA, 6644 bp, Homo sapiens
  CDS (158)..(4555)
ttcccggacccctgtttgctttagagccgagccgcgccgatgccctcacactctgcgcctcctctcccgggactttaacaccccgctctcctccaccgaccaggtgaccttttgctctgagccagatcagagaagaattcggtgtccgtgcgggacgatgcctgagcaggagagacagatcacagccagagaaggggccagtcggaaaatcttatctaagctttctttgcctacccgtgcctgggaaccagcaatgaagaagagttttgcttttgacaatgttggctatgaaggtggtctggatggcctgggcccttcttctcaggtggccaccagcacagtcaggatcttgggcatgacttgccagtcatgtgtgaagtccattgaggacaggatttccaatttgaaaggcatcatcagcatgaaggtttccctggaacaaggcagtgccactgtgaaatatgtgccatcggttgtgtgcctgcaacaggtttgccatcaaattggggacatgggcttcgaggccagcattgcagaaggaaaggcagcctcctggccctcaaggtccttgcctgcccaggaggctgtggtcaagctccgggtggagggcatgacctgccagtcctgtgtcagctccattgaaggcaaggtccggaaactgcaaggagtagtgagagtcaaagtctcactcagcaaccaagaggccgtcatcacttatcagccttatctcattcagcccgaagacctcagggaccatgtaaatgacatgggatttgaagctgccatcaagagcaaagtggctcccttaagcctgggaccaattgatattgagcggttacaaagcactaacccaaagagacctttatcttctgctaaccagaattttaataattctgagaccttggggcaccaaggaagccatgtggtcaccctccaactgagaatagatggaatgcattgtaagtcttgcgtcttgaatattgaagaaaatattggccagctcctaggggttcaaagtattcaagtgtccttggagaacaaaactgcccaagtaaagtatgacccttcttgtaccagcccagtggctctgcagagggctatcgaggcacttccacctgggaattttaaagtttctcttcctgatggagccgaagggagtgggacagatcacaggtcttccagttctcattcccctggctccccaccgagaaaccaggtccagggcacatgcagtaccactctgattgccattgccggcatgacctgtgcatcctgtgtccattccattgaaggcatgatctcccaactggaaggggtgcagcaaatatcggtgtctttggccgaagggactgcaacagttctttataatccctctgtaattagcccagaagaactcagagctgctatagaagacatgggatttgaggcttcagtcgtttctgaaagctgttctactaaccctcttggaaaccacagtgctgggaattccatggtgcaaactacagatggtacacctacatctgtgcaggaagtggctccccacactgggaggctccctgcaaaccatgccccggacatcttggcaaagtccccacaatcaaccagagcagtggcaccgcagaagtgcttcttacagatcaaaggcatgacctgtgcatcctgtgtgtctaacatagaaaggaatctgcagaaagaagctggtgttctctccgtgttggttgccttgatggcaggaaaggcagagatcaagtatgacccagaggtcatccagcccctcgagatagctcagttcatccaggacctgggttttgaggcagcagtcatggaggactacgcaggctccgatggcaacattgagctgacaatcacagggatgacctgcgcgtcctgtgtccacaacatagagtccaaactcacgaggacaaatggcatcacttatgcctccgttgcccttgccaccagcaaagcccttgttaagtttgacccggaaattatcggtccacgggatattatcaaaattattgaggaaattggctttcatgcttccctggcccagagaaaccccaacgctcatcacttggaccacaagatggaaataaagcagtggaagaagtctttcctgtgcagcctggtgtttggcatccctgtcatggccttaatgatctatatgctgatacccagcaacgagccccaccagtccatggtcctggaccacaacatcattccaggactgtccattctaaatctcatcttctttatcttgtgtacctttgtccagctcctcggtgggtggtacttctacgttcaggcctacaaatctctgagacacaggtcagccaacatggacgtgctcatcgtcctggccacaagcattgcttatgtttattctctggtcatcctggtggttgctgtggctgagaaggcggagaggagccctgtgacattcttcgacacgccccccatgctctttgtgttcattgccctgggccggtggctggaacacttggcaaagagcaaaacctcagaagccctggctaaactcatgtctctccaagccacagaagccaccgttgtgacccttggtgaggacaatttaatcatcagggaggagcaagtccccatggagctggtgcagcggggcgatatcgtcaaggtggtccctgggggaaagtttccagtggatgggaaagtcctggaaggcaataccatggctgatgagtccctcatcacaggagaagccatgccagtcactaagaaacccggaagcactgtaattgcggggtctataaatgcacatggctctgtgctcattaaagctacccacgtgggcaatgacaccactttggctcagattgtgaaactggtggaagaggctcagatgtcaaaggcacccattcagcagctggctgaccggtttagtggatattttgtcccatttatcatcatcatgtcaactttgacgttggtggtatggattgtaatcggttttatcgattttggtgttgttcagagatactttcctaaccccaacaagcacatctcccagacagaggtgatcatccggtttgctttccagacgtccatcacggtgctgtgcattgcctgcccctgctccctggggctggccacgcccacggctgtcatggtgggcaccggggtggccgcgcagaacggcatcctcatcaagggaggcaagcccctggagatggcgcacaagataaagactgtgatgtttgacaagactggcaccattacccatggcgtccccagggtcatgcgggtgctcctgctgggggatgtggccacactgcccctcaggaaggttctggctgtggtggggactgcggaggccagcagtgaacaccccttgggcgtggcagtcaccaaatactgtaaagaggaacttggaacagagaccttgggatactgcacggacttccaggcagtgccaggctgtggaattgggtgcaaagtcagcaacgtggaaggcatcctggcccacagtgagcgccctttgagtgcaccggccagtcacctgaatgaggctggcagccttcccgcagaaaaagatgcagtcccccagaccttctctgtgctgattggaaaccgtgagtggctgaggcgcaacggtttaaccatttctagcgatgtcagtgacgctatgacagaccacgagatgaaaggacagacagccatcctggtggctattgacggtgtgctctgtgggatgatcgcaatcgcagacgctgtcaagcaggaggctgccctggctgtgcacacgctgcagagcatgggtgtggacgtggttctgatcacgggggacaaccggaagacagccagagctattgccacccaggttggcatcaacaaagtctttgcagaggtgctgccttcgcacaaggtggccaaggtccaggagctccagaataaagggaagaaagtcgccatggtgggggatggggtcaatgactccccggccttggcccaggcagacatgggtgtggccattggcaccggcacggatgtggccatcgaggcagccgacgtcgtccttatcagaaatgatttgctggatgtggtggctagcattcacctttccaagaggactgtccgaaggatacgcatcaacctggtcctggcactgatttataacctggttgggatacccattgcagcaggtgtcttcatgcccatcggcattgtgctgcagccctggatgggctcagcggccatggcagcctcctctgtgtctgtggtgctctcatccctgcagctcaagtgctataagaagcctgacctggagaggtatgaggcacaggcgcatggccacatgaagcccctgacggcatcccaggtcagtgtgcacataggcatggatgacaggtggcgggactcccccagggccacaccatgggaccaggtcagctatgtcagccaggtgtcgctgtcctccctgacgtccgacaagccatctcggcacagcgctgcagcagacgatgatggggacaagtggtctctgctcctgaatggcagggatgaggagcagtacatctgatgacttcaggcaggcgggccggggcagggacttgcctccactcaccacaagctgagcaggacagccagcagcaggatgggctgagctagcctccagctttggggacttccgctccctggatatgtccagtcatcctgccctgcagcacgcggccttgtctgggtgcagctgggcttggcctggagaggacggccctgcctgcctcttggcctcacgggaccgtcagcatgggctttgtcttggactctagtccttggctggactgtagaaggtgagaggcgagtcaccctcctcacagacctctgcttggagtatttaggatgactgctgtgaaatggagaacagtttcatcaggaccaaaaaacctcactgggcctttccagagaactgcagacctcactgtcagggtctttctgatgacgcctgtctgtgtgcatcatgtttctgagaccacagtttacctcaggtgtgcctgttgctttcttcctgcatagtctgttcctttcttcgtacatagtctgttccttttctctcctgtgtgcttgtcagtggggacccctcgcaaccctgcctgtcacctgggagggtgggaccaatgtccttgtggtctttgctgctgctctcaggcgcttctccaatgctctggagtgtgcatttcagcttgaacctgcttcctggctcacacatccccagccagggagcttgccacactcttcttcaagttgaggagagttcttttttgcttaaagcccccttctccatggagtgttggcttctcaatagagtgttgttgctgaccagctggagtgagggcctcagagcctgacctgagagtccgtactcggcttcctgtggggtgtaggttctcgcgattcaggacgtccttccatatccctgcccagcctgtggtgcttgaaacgtttgccccatgggaaacgtatgtgtgcaggagcctccctgcacggcccaaggggcttcgttttcagtcttctgactgtcacctcgtggggttcagtagagaattcatgtgactagcgcctggccttgtgtggcttggaggaaatggtactgcccaaataggaggaaaacacagcctccctgagcctgcattctgcacgctgcccaggggcttcagaaaaggagtggccacagcaccccgaagggagcatctgtttacctggcagtggctctcagagcagcagaacgggttcagttttagactctgaagttggttgtgattgacagaaccctttgggagcaaactagtagagttggattaaattctgggtgaaacccttttctcccacacaaaatagttttagtgatttttttcattgtccattacttgccaggggcagttttagcagcacttttgatagattacgtctaatcctcccaaccaaccagcagggtagctattactgtccacattttacaggcaaggaaacaggctccaagaggctgaggactttgcccaggatgacatagccaatggacaagcagtgtctgtcagctgtgaaggcttcactcttattgtccttctaccttgaatagaagttttcctgataagaataaacgaggaaaaggtccttgcctcctggaagaacaaatctaccaggtgatctattcattgtttcaactcagaatgcacttgattcaggaggtcatctgaccttcaccttggatggttagtttcactttttacatatagtttttgcagggttttattttataaaatccaagcgcgctgttgattgtgttttccttgttttcagcccccccactccagcccgcagcacatttccgctgtccgtcagtaattgtgtcctctctttatgcttgcttggggaatgttgttttctgactaggctgatcattatctaaagaatctaattctgttgatttttaaaacttttaggaccataaacgttgtgttcatatatggacatggaaatatttatataattttatagaaaataaccttttagatggtcaaagtgtaaggagtttttttgtcagataatcatttctacttcaaaaacatttcatgcaatattagaataaagttcctgtcattcctctaaaaaaa

SEQ ID NO: 436 - protein, 1465 aa, Homo sapiens
MPEQERQITAREGASRKILSKLSLPTRAWEPAMKKSFAFDNVGYEGGLDGLGPSSQVATSTVRILGMTCQSCVKSIEDRISNLKGIISMKVSLEQGSATVKYVPSVVCLQQVCHQIGDMGFEASIAEGKAASWPSRSLPAQEAVVKLRVEGMTCQSCVSSIEGKVRKLQGVVRVKVSLSNQEAVITYQPYLIQPEDLRDHVNDMGFEAAIKSKVAPLSLGPIDIERLQSTNPKRPLSSANQNFNNSETLGHQGSHVVTLQLRIDGMHCKSCVLNIEENIGQLLGVQSIQVSLENKTAQVKYDPSCTSPVALQRAIEALPPGNFKVSLPDGAEGSGTDHRSSSSHSPGSPPRNQVQGTCSTTLIAIAGMTCASCVHSIEGMISQLEGVQQISVSLAEGTATVLYNPSVISPEELRAAIEDMGFEASVVSESCSTNPLGNHSAGNSMVQTTDGTPTSVQEVAPHTGRLPANHAPDILAKSPQSTRAVAPQKCFLQIKGMTCASCVSNIERNLQKEAGVLSVLVALMAGKAEIKYDPEVIQPLEIAQFIQDLGFEAAVMEDYAGSDGNIELTITGMTCASCVHNIESKLTRTNGITYASVALATSKALVKFDPEIIGPRDIIKIIEEIGFHASLAQRNPNAHHLDHKMEIKQWKKSFLCSLVFGIPVMALMIYMLIPSNEPHQSMVLDHNIIPGLSILNLIFFILCTFVQLLGGWYFYVQAYKSLRHRSANMDVLIVLATSIAYVYSLVILVVAVAEKAERSPVTFFDTPPMLFVFIALGRWLEHLAKSKTSEALAKLMSLQATEATVVTLGEDNLIIREEQVPMELVQRGDIVKVVPGGKFPVDGKVLEGNTMADESLITGEAMPVTKKPGSTVIAGSINAHGSVLIKATHVGNDTTLAQIVKLVEEAQMSKAPIQQLADRFSGYFVPFIIIMSTLTLVVWIVIGFIDFGVVQRYFPNPNKHISQTEVIIRFAFQTSITVLCIACPCSLGLATPTAVMVGTGVAAQNGILIKGGKPLEMAHKIKTVMFDKTGTITHGVPRVMRVLLLGDVATLPLRKVLAVVGTAEASSEHPLGVAVTKYCKEELGTETLGYCTDFQAVPGCGIGCKVSNVEGILAHSERPLSAPASHLNEAGSLPAEKDAVPQTFSVLIGNREWLRRNGLTISSDVSDAMTDHEMKGQTAILVAIDGVLCGMIAIADAVKQEAALAVHTLQSMGVDVVLITGDNRKTARAIATQVGINKVFAEVLPSHKVAKVQELQNKGKKVAMVGDGVNDSPALAQADMGVAIGTGTDVAIEAADVVLIRNDLLDVVASIHLSKRTVRRIRINLVLALIYNLVGIPIAAGVFMPIGIVLQPWMGSAAMAASSVSVVLSSLQLKCYKKPDLERYEAQAHGHMKPLTASQVSVHIGMDDRWRDSPRATPWDQVSYVSQVSLSSLTSDKPSRHSAAADDDGDKWSLLLNGRDEEQYI

SEQ ID NO: 437 - DNA, 1177 bp, Homo sapiens
  CDS (179)..(862)
gtgcgtcgtagccgaacgctgtggcggggcaggcgaggcggtcgcttcgagcgcgctagtcagctccctgaagggagtgacggcggttgggtgcccgcggccacttttgccttcccggggagatgtcctttgcttctcagatgtaaatgcactttaagtttgttattcaacagtgaaaatgagtcatacagaggttaaattaaaaataccttttggaaataaattactagatgctgtttgtttggtacctaacaagagcttaacatatggaataattcttacacatggagcatcaggagatatgaatcttcctcatttgatgtcactggcatcccatcttgcatctcatgggtttttctgcctgagatttacctgtaaaggccttaatattgtacatagaattaaggcgtataaatcagttttgaattacctgaagacatcaggagaatacaaacttgcaggtgtttttcttggaggtcgttcaatgggctcaagagcagctgcttctgtaatgtgtcacattgagccagatgatggtgatgattttgttcggggtctcatttgtatttcttacccactgcaccatccaaagcagcagcataaactcagagatgaagacctctttcgtttaaaagagcctgtactgtttgtgtcaggctcagcagatgaaatgtgtgaaaagaacttgttggagaaagtggcacagaaaatgcaagctccccataaaatccactggattgagaaggcaaatcattccatggcagtgaaaggacggtcgacaaatgatgttttcaaagaaataaatacacagattttgttttggatccaagaaattactgaaatggacaagaaatgtcattagttaaaagccatgttatcttgagtacacatacagttaatttgataaagaagagtatgcctctcagcattgtgagatatatttcagactaatttgatgttctttaatgttcccttatttttgaaacacgttttaaatgtgaaattaatgtccttcacaaaatgtcttttgaaagcactgttacagttgtataaagatgatgtaaaaatattgaaggtggtctacatataatttattttcattagtatagttaagttttgaaaaaaattaaacatctgaattttgttacaaaaaaaaaaaaaaaaaaaaaaaaaaaaa

SEQ ID NO: 438 - protein, 227 aa, Homo sapiens
MSHTEVKLKIPFGNKLLDAVCLVPNKSLTYGIILTHGASGDMNLPHLMSLASHLASHGFFCLRFTCKGLNIVHRIKAYKSVLNYLKTSGEYKLAGVFLGGRSMGSRAAASVMCHIEPDDGDDFVRGLICISYPLHHPKQQHKLRDEDLFRLKEPVLFVSGSADEMCEKNLLEKVAQKMQAPHKIHWIEKANHSMAVKGRSTNDVFKEINTQILFWIQEITEMDKKCH

SEQ ID NO: 439 - DNA, 2589 bp, Homo sapiens
  CDS (24)..(2510)
gacggacggggtcaggtcccatcatggcggctgaagaggcggatgtggatatcgaaggggacgtggtagcggcggcgggggcacagccaggaagtggtgaaaatacagcatcagttttacaaaaagatcactatcttgattcatcttggagaacagagaatggccttattccttggaccttggataacaccatcagtgaagagaacagagctgttattgagaaaatgttgttggaagaagaatattatttatctaaaaaatcacaaccggaaaaagtctggcttgatcaaaaggaagatgataaaaaatacatgaagagtctgcagaaaacagcaaaaatcatggtacactctcctacaaaaccagccagttactcagtaaagtggacgatagaagaaaaagagctgtttgaacaagggctggctaaatttggccgaagatggaccaaaatttcaaagctaattggaagccgcactgttttacaagtgaagagttatgcaagacagtattttaaaaataaggtcaaatgcggtctggataaagaaacaccaaatcagaagaccggccataatcttcaagttaaaaatgaagataaagggacaaaggcatggacaccatcatgtttaaggggacgtgctgatcccaacttgaatgctgtaaaaattgaaaagttatctgatgatgaagaagtagacatcacagatgaggtggacgagttgtcttctcaaacaccccagaagaattctagcagtgatctcttgttagactttcctaatagtaaaatgcatgaaaccaatcaaggagaattcattacttctgacagccaggaagctctcttttctaagtcttccaggggctgtcttcaaaatgaaaagcaagatgaaacactttcaagctcagaaattacactgtggactgagaaacagagcaatggtgacaaaaaatcaattgaattaaatgaccagaaatttaatgaattgattaaaaactgcaacaagcatgatggaaggggaataatagttgatgccaggcagttgccttctccagagccttgtgaaattcagaaaaatttgaatgataatgaaatgctttttcattcttgccaaatggtagaggaaagccatgaggaagaagagcttaagccaccagaacaggaaatagaaatagatagaaatatcattcaagaagaagaaaaacaagcaattcctgagttttttgaggggcgccaagctaaaacaccagaacgctatttgaaaattagaaattatattttggatcaatgggagatatgcaaaccaaaatacttaaataagacctcagtacgtcctggcctgaagaactgtggagatgttaattgtattggacggattcatacatacctcgaattgataggagcaatcaattttggatgtgaacaggctgtgtataataggccacaaacagttgacaaagtacgaatcagagacagaaaagatgcagtagaagcataccaacttgcccagcgtctgcagtctatgcgtacaaggagacgtagggtccgagacccatggggaaactggtgtgatgcaaaggacttagaaggacaaacgtttgagcatctctctgctgaggagttggcaaaaagaagagaagaggaaaaaggcagacctgttaaatctttaaaagtgccaagaccaacaaaaagctcgtttgatcccttccaactgataccttgtaatttttttagtgaagaaaagcaggagccatttcaggtgaaagtggcttcagaagcacttttaataatggatttgcatgctcatgtttctatggcagaagtgattggtctgttaggaggaagatactcagaagttgataaagtagttgaagtctgtgcagcagaaccatgtaacagtctgagtacaggactacagtgtgagatggatcctgtatcacaaacacaggcctcagaaaccttggctgttagaggcttcagtgttattggatggtatcattctcatcctgcttttgatcctaatccttccttacgagatattgacacacaagctaaataccagagttacttctccagaggaggtgcaaagttcattgggatgattgttagtccctataatcgaaataatcccttaccatattctcagattacctgcctggttataagtgaggaaattagcccagatggctcttatcgcttaccttacaaatttgaagtacagcagatgttagaagaacctcagtggggattagtatttgaaaagacaagatggataatagaaaaatacaggctctcccatagcagcgtccccatggataaaatctttcgccgggattctgacctgacttgtttgcagaaacttttggagtgtatgaggaagactctgagcaaagtgaccaattgctttatggctgaagaattcttgactgaaatagaaaatttgttcctttccaattataaaagcaaccaagagaatggagtaaccgaagagaactgtacaaaggaattgttaatgtgattattttaaagttaagacattttaatcttgacacagtagatcttactttcaaagttataaacttgaagtgattgtagtt

SEQ ID NO: 440 - protein, 828 aa, Homo sapiens
MAAEEADVDIEGDVVAAAGAQPGSGENTASVLQKDHYLDSSWRTENGLIPWTLDNTISEENRAVIEKMLLEEEYYLSKKSQPEKVWLDQKEDDKKYMKSLQKTAKIMVHSPTKPASYSVKWTIEEKELFEQGLAKFGRRWTKISKLIGSRTVLQVKSYARQYFKNKVKCGLDKETPNQKTGHNLQVKNEDKGTKAWTPSCLRGRADPNLNAVKIEKLSDDEEVDITDEVDELSSQTPQKNSSSDLLLDFPNSKMHETNQGEFITSDSQEALFSKSSRGCLQNEKQDETLSSSEITLWTEKQSNGDKKSIELNDQKFNELIKNCNKHDGRGIIVDARQLPSPEPCEIQKNLNDNEMLFHSCQMVEESHEEEELKPPEQEIEIDRNIIQEEEKQAIPEFFEGRQAKTPERYLKIRNYILDQWEICKPKYLNKTSVRPGLKNCGDVNCIGRIHTYLELIGAINFGCEQAVYNRPQTVDKVRIRDRKDAVEAYQLAQRLQSMRTRRRRVRDPWGNWCDAKDLEGQTFEHLSAEELAKRREEEKGRPVKSLKVPRPTKSSFDPFQLIPCNFFSEEKQEPFQVKVASEALLIMDLHAHVSMAEVIGLLGGRYSEVDKVVEVCAAEPCNSLSTGLQCEMDPVSQTQASETLAVRGFSVIGWYHSHPAFDPNPSLRDIDTQAKYQSYFSRGGAKFIGMIVSPYNRNNPLPYSQITCLVISEEISPDGSYRLPYKFEVQQMLEEPQWGLVFEKTRWIIEKYRLSHSSVPMDKIFRRDSDLTCLQKLLECMRKTLSKVTNCFMAEEFLTEIENLFLSNYKSNQENGVTEENCTKELLM

SEQ ID NO: 441 - DNA, 1480 bp, Homo sapiens
  CDS (1)..(1404)
tctggaacattagacaggatgctgatcttctggacaatcacacttttcctgctgggagcagccaaaggaaaagaagtttgctatgaggacctcgggtgcttttctgacactgagccctggggcgggacagcaatcaggcccctgaaaattctcccctggagccctgagaagatcggcacccgcttcctgctgtacaccaatgaaaacccaaacaactttcaaattctcctcctctctgatccatcaacaattgaggcatcaaattttcaaatggacagaaagacccggttcatcatccatggcttcatagacaaaggagatgagagctgggtgacagacatgtgcaagaaactgttcgaggtggaggaggtgaactgcatctgcgtggactggaagaagggctcccaagccacctacacacaggctgccaacaacgtgcgagtggtgggcgcccaggtggcccagatgctcgacatcctcttgacagagtatagctaccccccttccaaagttcacctcattggccacagcctgggagcccacgtggctggagaggcaggaagcaagactccaggcctgagcaggattacagggttggatcctgtagaagcaagtttcgagagtactcctgaagaggtgcgacttgatccctctgatgctgactttgttgatgtgattcacacggatgcagctcccctgatcccattcttgggttttggaacgaaccaacagatgggtcatcttgacttcttccccaatggaggagagagcatgccgggatgcaagaagaatgccctgtctcagatcgtggatctagatggcatctgggcgggaacccgggactttgtggcttgcaatcacctaagaagctacaagtattacttggaaagcatcctcaatcccgatgggtttgctgcatatccctgcacttcctacaagtcctttgagtctgacaagtgcttcccgtgtccagatcaaggatgcccacagatgggtcactatgctgataaatttgctggcaggacaagtgaagagcagcagaaattcttcttgaacacaggagaggctagcaatttcgctcgctggagatatggggtttccatcacactgtctggaagaacagccactggtcagatcaaagttgctttgtttggaaataagggaaacactcaccagtacagcatcttcagggggattctcaaaccaggctcaacccattcctatgagtttgatgcaaagctggatgttggaacaattgagaaagtcaagtttctttggaataacaatgtgataaatccaaccctccccaaagtgggtgccaccaagatcactgtgcaaaagggagaagagaagacagtgtacaacttctgtagcgaagacacagtgcgggaagacacgctgctcaccctcacgccctgctaagctcccggggcgacgaggctgctgcgttcacactaataaaatccactggtgcatctgt

SEQ ID NO: 442 - protein, 468 aa, Homo sapiens
SGTLDRMLIFWTITLFLLGAAKGKEVCYEDLGCFSDTEPWGGTAIRPLKILPWSPEKIGTRFLLYTNENPNNFQILLLSDPSTIEASNFQMDRKTRFIIHGFIDKGDESWVTDMCKKLFEVEEVNCICVDWKKGSQATYTQAANNVRVVGAQVAQMLDILLTEYSYPPSKVHLIGHSLGAHVAGEAGSKTPGLSRITGLDPVEASFESTPEEVRLDPSDADFVDVIHTDAAPLIPFLGFGTNQQMGHLDFFPNGGESMPGCKKNALSQIVDLDGIWAGTRDFVACNHLRSYKYYLESILNPDGFAAYPCTSYKSFESDKCFPCPDQGCPQMGHYADKFAGRTSEEQQKFFLNTGEASNFARWRYGVSITLSGRTATGQIKVALFGNKGNTHQYSIFRGILKPGSTHSYEFDAKLDVGTIEKVKFLWNNNVINPTLPKVGATKITVQKGEEKTVYNFCSEDTVREDTLL

SEQ ID NO: 443 - DNA, 1599 bp, Homo sapiens
  CDS (107)..(985)
agtggggcggggctcccggttccaggcgagttcgcagctgcgcgccgggtcctggaggccgaggccgctcccgcccgttgtccccgcagtccccgacgggagcgccatggcccagccgccgcccgacgtggagggggacgactgtctccccgcgtaccgccacctcttctgcccggacctgctgcgggacaaagtggccttcatcacaggaggcggctctgggattgggttccggattgctgagattttcatgcggcacggctgccatacggtgattgccagtaggagcctgccgcgagtgctgacggccgccaggaagctggctggggccaccggccggcgctgcctccctctctctatggacgtccgagcgcccccagctgtcatggccgccgtggaccaggctctgaaggagtttggcagaatcgacattctcattaactgtgcggccgggaacttcctgtgccccgctggcgccttgtccttcaacgccttcaagaccgtgatggacatcgataccagcggcaccttcaatgtgtctcgtgtgctctatgagaagttcttccgggaccacggaggggtgatcgtgaacatcactgccaccctggggaaccgggggcaggcgctccaggtgcatgcaggctccgccaaggccgctgtggacgcgatgacgcggcacttggctgtggagtggggtccccaaaacatccgcgtcaacagcctcgcccctggccccatcagtggcacagaggggctccggcgactgggtggccctcaggccagcctgagcaccaaggtcactgccagcccgctgcagaggctggggaacaagaccgagatcgcccacagcgtgctctacctggccagccctctggcttcctacgtgacgggggccgtgctggtggccgatggcggggcatggttgacgttcccaaacggtgtcaaagggctgccggatttcgcatccttctctgctaagctctaggaatcttccggccgctgcttcctgccgcctcactcagccaggtggagagcaccaatctgaaccagcaatgcctgcagcccagcccctcctctgaacactcagctattactgcgctttccctccccacggccccaactccagggcaggagcaactggacagtgggcctggcccgtggagctgccacgcaggtgcctgagggccaggtgccacgcaggtgtctgaggaccaggtgccacgcaggtggtgggggtacagacaagatgctgggatgtcccctgccccatggtcaagggtgtcctgcctgcctgggtccagggcctgagggagccacatggatcccgagacttgtgttctcttggctgaaaacactgaggtgctcccatctgtgcgtggcccatgagctgggatggtcctccagctgcccacaaggtccgcccctctgtctctgcaccacctgtttgcataaacacactttgctacaatcttgctagtgcgttttcttaaaagataatctatttactgtaaaaataaattggactttgcaaaagcttttagaaggaaaagaaagaggattaaagagaattgctggtgatcctaaaaaaaaaaaaaaaaa

SEQ ID NO: 444 - protein, 292 aa, Homo sapiens
MAQPPPDVEGDDCLPAYRHLFCPDLLRDKVAFITGGGSGIGFRIAEIFMRHGCHTVIASRSLPRVLTAARKLAGATGRRCLPLSMDVRAPPAVMAAVDQALKEFGRIDILINCAAGNFLCPAGALSFNAFKTVMDIDTSGTFNVSRVLYEKFFRDHGGVIVNITATLGNRGQALQVHAGSAKAAVDAMTRHLAVEWGPQNIRVNSLAPGPISGTEGLRRLGGPQASLSTKVTASPLQRLGNKTEIAHSVLYLASPLASYVTGAVLVADGGAWLTFPNGVKGLPDFASFSAKL

SEQ ID NO: 445 - DNA, 2292 bp, Homo sapiens
  CDS (294)..(2036)
gctcgccaacggccgacgctccaggccgtcccgcccagcgcagctgcacccaatcacaatgctcagatcgggaggtggagccaatcaggtccaaccaagaggaggggacaccggcactccactagcaggaaaacgggccgagggaccgcaagcagggggtgcctagtcctcgtcccccaaagaccaatcgtaagccagatacaggcgagtgactgtcaagaaggccaattagagcctccgaagggaatctggacctgcctcttctctgagggacggctctacctaccaatagcatgggcgagaaggcggtccctttgctaaggaggaggcgggtgaagagaagctgcccttcttgtggctcggagcttggggttgaagagaagagggggaaaggaaatccgatttccatccagttgttccccccagagctggtggagcatatcatctcattcctcccagtcagagaccttgttgccctcggccagacctgccgctacttccacgaagtgtgcgatggggaaggcgtgtggagacgcatctgtcgcagactcagtccgcgcctccaagatcagggttctggagtccggccctggaagagagctgccattctgaactacacgaagggcctgtatttccaggcatttggaggccgccgccgatgtctcagcaagagcgtggcccccttgctagcccacggctaccgccgcttcttgcccaccaaggatcacgtcttcattcttgactacgtggggaccctcttcttcctcaaaaatgccctggtctccaccctcggccagatgcagtggaagcgggcctgtcgctatgttgtgttgtgtcgtggagccaaggattttgcctcggacccaaggtgtgacacagtttaccgtaaatacctctacgtcttggccactcgggagccgcaggaagtggtgggtaccaccagcagccgggcctgtgactgtgttgaggtctatctgcagtctagtgggcagcgggtcttcaagatgacattccaccactcaatgaccttcaagcagatcgtgctggttggtcaggagacccagcgggctctactgctcctcacagaggaaggaaagatctactctttggtagtgaatgagacccagcttgaccagccacgctcctacacggttcagctggccctgaggaaggtgtcccactacctgcctcacctgcgcgtggcctgcatgacttccaaccagagcagcaccctctacgtcacagaccaggggggagtgtattttgaggtgcataccccaggggtgtatcgcgatctctttgggacccttcaagcctttgaccccctggaccagcagatgccgcttgctctctcactgcctgccaagatcctattctgtgctcttggctacaaccaccttggcctggtggatgaatttggccgaatcttcatgcaaggaaataacagatacgggcagctaggaacaggggacaaaatggaccgaggggaacccacacaggtttgttacctgcagcggcccatcaccctgtggtgcggcctcaaccactccctggtgctgagccagagctcagagttcagcaaggagctgctgggctgcggctgtggggctgggggccgcctcccaggctggcccaaggggagtgcctccttcgtcaagctccaagtcaaggtccctctgtgtgcctgtgccctctgtgccaccagggagtgcctatacatcctgtccagccacgacattgagcagcacgccccctatcgccacctgccagccagcagggtggtggggactcctgagcccagcctgggggccagagcaccccaggaccccggggggatggcccaggcctgcgaggagtacctcagccagatccacagttgccaaacgttgcaggaccgcacggagaagatgaaggagatcgtagggtggatgcccctgatggccgcacagaaggacttcttctgggaggccctggacatgctgcagagggctgaaggaggcgggggtggtgtagggcccccagcccctgagacctaatccccctcatgctagcctagtccctggaggagggagtccggccccaggccagggactaaggagcaatgaccattgtgcacatgcgtgtgggaaggggttgctagggggtggggacggctaaccagggtaagaatgttcagggggctgcccaggaggggcccccaacctgactatcatggacaagagatttgatggatagaataaaaggctgcagcgagaaaaaaaaaaaaaaaaaaaaaaaaaaaaaaaaaaaaaa

SEQ ID NO: 446 - protein, 580 aa, Homo sapiens
MGEKAVPLLRRRRVKRSCPSCGSELGVEEKRGKGNPISIQLFPPELVEHIISFLPVRDLVALGQTCRYFHEVCDGEGVWRRICRRLSPRLQDQGSGVRPWKRAAILNYTKGLYFQAFGGRRRCLSKSVAPLLAHGYRRFLPTKDHVFILDYVGTLFFLKNALVSTLGQMQWKRACRYVVLCRGAKDFASDPRCDTVYRKYLYVLATREPQEVVGTTSSRACDCVEVYLQSSGQRVFKMTFHHSMTFKQIVLVGQETQRALLLLTEEGKIYSLVVNETQLDQPRSYTVQLALRKVSHYLPHLRVACMTSNQSSTLYVTDQGGVYFEVHTPGVYRDLFGTLQAFDPLDQQMPLALSLPAKILFCALGYNHLGLVDEFGRIFMQGNNRYGQLGTGDKMDRGEPTQVCYLQRPITLWCGLNHSLVLSQSSEFSKELLGCGCGAGGRLPGWPKGSASFVKLQVKVPLCACALCATRECLYILSSHDIEQHAPYRHLPASRVVGTPEPSLGARAPQDPGGMAQACEEYLSQIHSCQTLQDRTEKMKEIVGWMPLMAAQKDFFWEALDMLQRAEGGGGGVGPPAPET

SEQ ID NO: 447 - DNA, 3460 bp, Homo sapiens
  CDS (88)..(1791)
cgagcccacatccgggagaggagagcggaagtggcgttggtctggccggagcccttgggtgaaattgttaggcgtggagagggagtgatgtcttccagactcggtgctgtacccgccacttcgggacccacaacctttaagcagcagaggagcacgaggatcgtgggagctaagaatagcaggacccagtgctccataaaggataatagtttccagtacactatccctcatgatgactccttaagtggttcatcgtctgcatcttcgtgtgaaccagtgagtgattttccagcatctttccgaaaatctacctactggatgaagatgagaagaatcaagccagctgctacttctcatgtcgaagggtcaggtggagtatcagccaaggggaaaaggaaacccaggcaggaagaagatgaagactatcgagaatttcctcagaagaagcataagctttatgggaggaagcaacggcctaaaactcagcccaatcccaaatcccaggcccgtcgtattcggaaggaaccaccagtttatgcagcaggcagtttggaggagcaatggtacttagaaatcgttgataaaggcagtgtctcctgccctacctgccaggcagtggggaggaagaccatagagggtttaaagaaacacatggaaaactgcaagcaggaaatgtttacttgtcatcattgtgggaaacaacttcgttcactggcagggatgaagtatcatgtcatggcaaatcataatagtttgcccattttgaaagccggagatgaaatagatgagccaagtgagagggaaaggctccgaacagttctaaagagactgggaaagctcaggtgcatgcgtgagagttgctccagtagcttcaccagcatcatgggatatctctaccatgtcagaaaatgtggcaaaggggctgcagagctggaaaagatgaccctgaaatgtcaccactgtggaaaaccatataggtcgaaggctggacttgcatatcacctgaggtcagagcatgggcctatatccttctttccagagtcaggacagccagagtgcttaaaggagatgaacctagagtcaaagagtgggggccgagttcagagacgttctgccaagatagctgtataccacctacaggagctggcctctgctgaactggccaaggaatggcccaagaggaaggtgcttcaggacctggtacctgatgatcgaaagttaaaatatactcgtccagggctccctaccttcagccaggaagtactacataaatggaagacagatatcaagaaatatcatcgtattcagtgtcctaaccagggctgtgaggctgtctacagcagtgtatctggccttaaagctcacctgggctcttgtacattgggaaactttgtggctggaaaatacaaatgtcttctatgtcagaaagaatttgtgtcagagagtggtgtcaagtatcacatcaactccgtccatgctgaggactggttcgttgtaaacccaacaacaaccaaaagctttgaaaagctgatgaagataaagcagcggcagcaagaagaagaaaagcggaggcagcagcacaggagcagaaggtctctaagaaggcggcagcagcctggcattgagcttcccgagacagagctgagtcttagagtagggaaggatcagaggaggaataatgaggaactggtagtgtcagcctcctgtaaggaaccagagcaggagccagtgccagcacagttccagaaagtaaagcccccaaagactaatcataaacgaggaaggaaataggcagtcagtgtaaaagtgctcctaggaaagcagatgtgatgctgttgtcacggggacctgtgctgggaggactgagtgaagattctttcagctgtttgtgtaaggctgtgactttctcagctccttcctcctgtgtaaatttcactgtcttcccttcttacattttgattcccccctccccttttagtaggttttcctgctattcctcgtcaagtcctcttgtttttttatcttgcccaaagagctccctctcaaggccaactataggctcctcttgccctgtacaaaactaagaaacctctttggttgtcctttccttcctggggtatagaatgttcttggaagctccattgatttagtagctgctccatcatctagcttgtgaaaccattccaaactaattttttaaaaccataactgatttgtcattttgtatttgtgatataacaagtctagaagttagaactgttgtcattcacataataagattactctgtctccttgggaaaaaaactttatggaggctgtttgtcctctcaatatggttttaagattgaaagtaagaaaacggatttaggatgaaaactctagaactaccctatgctgtttatactgggaaatgctttgtaccaagtagcagtgactagacccacagacatgaaaagcaaccttaggagtaaagtgacccaaacattaaaatgacaggaaagagaaagtagaagcagcaataaatactgccccaactttcctggagcccgaggcctcatccatagctatgatcacttgccctctgaagcttatttttgcttctttggttttaagaattgagaaatatcacattgcccctgatgttttgacagtctcctagtgctcctggtagtgccactaagggaaaaccaaggtgcgcattccttctccctggactttaccttacttgttagtctacgccccactgtttccacccatccccttagccaacctctgtctttttgaattttctgagaatattgtcctatcctcttttatatatggagttctctcctctttatatcctgagactttgacaccagatgtagatatttatctggagctggaaagaaaaattctttttctgtacctcatgcctatctggtaatgtttaatgggttatttctctttgagggtggctttctctggaacattggttagagcagctttgttgtcgtgtttctggattctcttccccattttgcgtaaatattggtcttatatattcttgcctattttgtggcatatgccacataaaaaatgaacctgatatagacaagtactaccttttcaaattctgaaaggctattaccactttaactctttgtgctcctccaaatagctttaaaatgtgggcttttgtgaagaccactttcaaacaagggagcactgaaacctgaattggatactgccagaataggtagttttgaaacaagttaaggacatggtatatgcactctgcattttcattggcagtgtgcccttaaagccctttcagtagatgagggttgtcagggaggagaaatgaagaagctatgttaatttctggtgagtaagacctggggaatgtttggcaatgacaaaagaaataaatgactctcagaaagaaaaaaaaaaaaaaaaaaaaaaaaaaaaaaaaaaa

SEQ ID NO: 448 - protein, 567 aa, Homo sapiens
MSSRLGAVPATSGPTTFKQQRSTRIVGAKNSRTQCSIKDNSFQYTIPHDDSLSGSSSASSCEPVSDFPASFRKSTYWMKMRRIKPAATSHVEGSGGVSAKGKRKPRQEEDEDYREFPQKKHKLYGRKQRPKTQPNPKSQARRIRKEPPVYAAGSLEEQWYLEIVDKGSVSCPTCQAVGRKTIEGLKKHMENCKQEMFTCHHCGKQLRSLAGMKYHVMANHNSLPILKAGDEIDEPSERERLRTVLKRLGKLRCMRESCSSSFTSIMGYLYHVRKCGKGAAELEKMTLKCHHCGKPYRSKAGLAYHLRSEHGPISFFPESGQPECLKEMNLESKSGGRVQRRSAKIAVYHLQELASAELAKEWPKRKVLQDLVPDDRKLKYTRPGLPTFSQEVLHKWKTDIKKYHRIQCPNQGCEAVYSSVSGLKAHLGSCTLGNFVAGKYKCLLCQKEFVSESGVKYHINSVHAEDWFVVNPTTTKSFEKLMKIKQRQQEEEKRRQQHRSRRSLRRRQQPGIELPETELSLRVGKDQRRNNEELVVSASCKEPEQEPVPAQFQKVKPPKTNHKRGRK

SEQ ID NO: 449 - DNA, 4312 bp, Homo sapiens
  CDS (152)..(1414)
ctgggctggggccgcggtggcggcagccgcggcggcgggcggcggttgctcgtgcgcggcggcggcggcgggtcccgcgggcggcggggcgctgacggccgggggcgcggcggctgcggcgggccgggcggcgggcggcgagcgggggaagatggcggagctggggaagaagtactgcgtgtactgcctggccgaggtgagcccgctgcgcttccgctgcaccgagtgccaggacatcgagctgtgccccgagtgcttctcggccggcgccgagatcggccaccaccgccgctaccacggctaccagctggtggacggcgggcgcttcacgctctgggggcccgaggccgagggcggctggaccagtcgcgaggagcagctgctgctggacgccatcgagcagttcggcttcggaaactgggaagatatggctgcccacgttggtgcttcccggactccccaagaggtgatggagcattacgtgagcatgtacatccacgggaacctggggaaggcctgcatccccgacaccatccccaaccgcgtgacagaccacacctgtcccagcggaggccccctctcacccagcctcaccaccccgctgcccccgctggacatctctgtggctgagcagcagcagctgggctacatgccgctgcgggatgattacgagatcgagtatgaccaggatgccgagacgctcatcagcgggctctctgtcaactatgatgacgacgacgtggagatcgagctgaagcgcgcccacgtggacatgtacgtgcggaagctgaaagagagacagcggcggaagaacatcgcccgtgactacaatctggtgccagccttcctggggaaggacaagaaggagaaggaaaaggcgctgaagcgcaagatcaccaaggaggagaaggagctgcgcctgaagctgaggccgctgtaccagttcatgtcatgcaaggagtttgatgacctttttgaaaacatgcacaaagaaaaaatgctccgggccaagatccgagaactgcagcggtaccggcgaaacgggatcaccaagatggaagagtcggcagagtacgaggcagcgcggcataaacgggagaagaggaaggagaacaaaaacctagccggctccaaacggggaaaggaggacggcaaagacagcgagttcgccgccattgagaaccttccaggcttcgagctcctgtcagatcgcgagaaggtgctctgcagctctttaaacttgagtccagcccgctacgtgactgtgaagactattataattaaagaccacctccagaagcggcaaggaatcccctccaaaagccgccttcctagctacctggacaaagtcctaaagaaaaggattttgaatttcctcacagaaagcggctggatctccagggacgcgtcttgaagctgagacgctttgaaagccagggtgatgctcagacagtgtgccagccaaaatgacttgggggaggggagccgcttccccactgttgctcttttttaaacaaattgagttcctttttttaagatagaaattcttttcatggtcctctgaaagaagcaatagtaacaatcttatattggatcatgggggaagcaaatgtgtgtattttaagtgagttcctgcgagtcatacactgcgatgatgctccgcctttacccgttcagttgggagcttattgtgagattggatcatttccttttgagtgttcttctctttggtacaaaagctattgtgggtgacaggagcagtgttttcctgctggacccgcaagccaccagctatttcctggtgacacaagctcttctcaggcggggctgcctgcaggctcccgttttctgagcccacgctgcccacagctgaccccagcgcagccccgggcacgcggcactttacatgggggcagcttgggcccagactcctccgctgtgtagcagatgaggaaaatcaggccagaggacaacaggctggcgttttgttgggaactgaagaggaatctgttgaacacagcgaccagatgaccttccatttcaccggcggcagcagtttcagcgtgcagttcccaaaccccaaagctgaccctgcgccccatttgaatacggccagagcctgctggttcactttgggtagagccgtgcctcttgggcaggctcccatagtgaccacgtccccacgaatgggaaagcacgttagtgggagggacgtaggacacgtgtggaccgccaggccctctcagtccattttccggggctgctcggtgctgctgttaagacgtgagtgcatttcacttggaagaacccattgtacaaagttcaaggctaagagttctgaattctggcgtcagcttcctcaggattttcttcagttgcaagtacctttccactgaaaatatgagcatgcccgcctggctagtaggcatctgtaagagtgtcgccaggcccgcgccagctgaggcctcagactagccaggcaagagccgtctgaccagttggctggcggtggttctggtggagcacgagggagcccgggtggtgccctgagcctcgagctgctctctgtcactgtcttgaatcagactcagaaatggcttcttcccagccctgcctacaagtttttctctggggtcctctttcaaggatgtccacggtaccttcctcctgaaacttgaggaagtcttttgtcttccagctgctcagggttctctggtccaagaccctgctttaaagagagtctttggcgtgctcagactccagcgctccgttcttcaaggaggttgacttgcctctcgggccccgtaggtaccaagagactgtttacctcccagaatgtttgggcttgaagttacattaaagtgaagttatttgaaagaaagaaaacctcatcatttctaaggatgacttaattactgtgccttttcctttctttttacacatcctactgtcccttagggtaaaattttcagcattaaataaaacatttcaaatatattgtatatggctttagttgtaaactatactgcatgctgacagagaagcgctcttttagctaagcccagaacttctcttttgacaataaagtactgagcagtggtatcatgagggccacctccacattgtcccctgcagaataaatgcggatgacagaaagcttatgctgtctaccactgaacagtgatggagatggtgctaagtttttacagttgtcttagccccagtggttctcaaggtggggctcctggcccagcagcagcaacttgtttgttagaatgcagacgcgcaggccccacctggcctcctgaatcaaaatggtgtgcggcagggtgcagcgagctgttttcacgaggcctccaggtgactggatgtaagcttgcttgagaactatgggttttagctattctggtgtctccctgattttctacagcgccaggatcctagtttggtgaggttttaaatttaatcttatttttatataaaatgattgccagacgtactatattaagcttgaagaagcagaagatccctgttaatgtgtatggcccaggccaagagctgtcaaatgaaaaactttgtgctgaagcaggtttttagtatgtatatctttttgatggtatgaagaatttatttaggcttgactgttttaaaacaccataatgaatgtataattaatttatgttaaagtattaaccctttgtcacaaaggaatggtaatgtgattggctgcctgttagcccatcgactattcccgtcacggtagtccttacctctgtcggcagctcagagcctccacatttttatatttaattctcatgataaattagccaccataatcccatggaattaggtcttgttaaaatctagtccgggcgcagtggctcacgcctgtaatcccagcactttgggaggccaaggcgggctgatcacgaggtcaagagatcgagaccatcctggccaacatggtgaaaccctgtctctactaaaaatacaaaaattagctgggtgtggtggtgcatgcctgtagtcccagctacttgggaggctgaggtaggagaattgcttgaacctgggaggcggaggttgcggtgagctgagatcacgccactacactccagcctggtgacagagcaagactccatctcaaaaaaaatctaagcaaactatctttgagtcaaaaaaagttggataactcatctatatttgaaataatgctgtctgaatggccaacatcccaagaatgtattaaaaacagcaaccctgcctaccgttttgatgacctttttccatattaaacaagttgagaacaaaa

SEQ ID NO: 450 - protein, 420 aa, Homo sapiens
MAELGKKYCVYCLAEVSPLRFRCTECQDIELCPECFSAGAEIGHHRRYHGYQLVDGGRFTLWGPEAEGGWTSREEQLLLDAIEQFGFGNWEDMAAHVGASRTPQEVMEHYVSMYIHGNLGKACIPDTIPNRVTDHTCPSGGPLSPSLTTPLPPLDISVAEQQQLGYMPLRDDYEIEYDQDAETLISGLSVNYDDDDVEIELKRAHVDMYVRKLKERQRRKNIARDYNLVPAFLGKDKKEKEKALKRKITKEEKELRLKLRPLYQFMSCKEFDDLFENMHKEKMLRAKIRELQRYRRNGITKMEESAEYEAARHKREKRKENKNLAGSKRGKEDGKDSEFAAIENLPGFELLSDREKVLCSSLNLSPARYVTVKTIIIKDHLQKRQGIPSKSRLPSYLDKVLKKRILNFLTESGWISRDAS

SEQ ID NO: 451 - DNA, 5904 bp, Homo sapiens
  CDS (300)..(1553)
agcgggactgagcgccgggagagacctgcgcaggcgcaggcgcgcgggaagggccagcctgggtggcccaccccgcgcctggcgggactggccgccaactcccctccgctccagtcacttgtctggagcttgaagaagtgggtattccccttcccaccccaggcactggaggagcggccccccggggattccaggacctgagctccgggagctggactcgcagcgaccgcggcagagcgagcgggcgccgggaagcgaggagacgcccgcgggaggcccagctgctcggagcaactggcatggcccgagccatggccgccgcgtggccgctgctgctggtggcgctactggtgctgtcctggccacccccaggaaccggggacgtcgtcgtgcaggcgcccacccaggtgcccggcttcttgggcgactccgtgacgctgccctgctacctacaggtgcccaacatggaggtgacgcatgtgtcacagctgacttgggcgcggcatggtgaatctggcagcatggccgtcttccaccaaacgcagggccccagctattcggagtccaaacggctggaattcgtggcagccagactgggcgcggagctgcggaatgcctcgctgaggatgttcgggttgcgcgtagaggatgaaggcaactacacctgcctgttcgtcacgttcccgcagggcagcaggagcgtggatatctggctccgagtgcttgccaagccccagaacacagctgaggttcagaaggtccagctcactggagagccagtgcccatggcccgctgcgtctccacagggggtcgcccgccagcccaaatcacctggcactcagacctgggcgggatgcccaatacgagccaggtgccagggttcctgtctggcacagtcactgtcaccagcctctggatattggtgccctcaagccaggtggacggcaagaatgtgacctgcaaggtggagcacgagagctttgagaagcctcagctgctgactgtgaacctcaccgtgtactaccccccagaggtatccatctctggctatgataacaactggtaccttggccagaatgaggccaccctgacctgcgatgctcgcagcaacccagagcccacaggctataattggagcacgaccatgggtcccctgccaccctttgctgtggcccagggcgcccagctcctgatccgtcctgtggacaaaccaatcaacacaactttaatctgcaacgtcaccaatgccctaggagctcgccaggcagaactgaccgtccaggtcaaagagggacctcccagtgagcactcaggcatatcccgtaacgccatcatcttcctggttctgggaatcctggtttttctgatcctgctggggatcgggatttatttctattggtccaaatgttcccgtgaggtcctttggcactgtcatctgtgtccctcgagtacagagcatgccagcgcctcagctaatgggcatgtctcctattcagctgtgagcagagagaacagctcttcccaggatccacagacagagggcacaaggtgacagcgtcgggactgagaggggagagagactggagctggcaaggacgtgggcctccagagttggacccgaccccaatggatgaagaccccctccaaagagaccagcctccctccctgtgccagacctcaaaacgacgggggcaggtgcaagttcataggtctccaagaccaccctcctttcatttgctagaaggactcactagactcaggaaagctgttaggctcacagttacagtttattacagtaaaaggacagagattaagatcagcaaagggaggaggtgcacagcacacgttccacgacagatgaggcgacggcttccatctgccctctcccagtggagccatataggcagcacctgattctcacagcaacatgtgacaacatgcaagaagtactgccaatactgccaaccagagcagctcactcgagatctttgtgtccagagttttttgtttgtcttgagacagggtctggctctgttggcagactagagtacagtggtgagatcacagttcattgcagccttgacttctcaacgccaagtcatcctcccacctcagcctcctgagtagctatgactacaggtatgtgccaccacgtctggctaatctttttattatttgtaaagtcgaggtttccctgtgttgcccaggctggtcttgaactcttggctccaagtgatacttctgccttggcctcccaaagtgctgaattaagcagctcaccatccacacggctgacctcatacatcaagccaataccgtgtggcccaagacccccaccataaatcacatcattagcatgaaccacccagagtggcccaagactcccagatcagctaccaggcaggatattccaagggcttagagatgaatgcccaggagctgaggataaagggcccgatctttctttgggcaaggttaagcctttactgcatagcagaccacacagaagggtgtgggccaccagagaattttggtaaaaatttggcctctggccttgagcttctaaatctctgtatccgtcagatctctgtggttacaagaaacagccactgaccctggtcaccagaggctgcaattcaggccgcaagcagctgcctggggggtgtccaaggagcagagaaaactactagatgtgaacttgaagaaggttgtcagctgcagccactttctgccagcatctgcagccactttctgccagcatctgcagccagcaagctgggactggcaggaaataacccacaaaagaagcaaatgcaatttccaacacaagggggaagggatgcagggggaggcagcgctgcagttgctcaggacacgctcctataggaccaagatggatgcgacccaagacccaggaggcccagctgctcagtgcaactgacaagttaaaaaggtctatgatcttgagggcagacagcagaattcctcttataaagaaaactgtttgggaaaatacgttgagggagagaagaccttgggccaagatgctaaatgggaatgcaaagcttgagctgctctgcaagagaaaataagcaggacagaggatttgctctggacagagatggaagagccgggaacagagaagtgtggggaagagataggaaccagcaggatggcaggggcaaagggctcaagggtgaggaggccagtgggaccccacagagttggggagataaaggaacattggttgctttggtggcacgtaagctccttgtctgtctccagcacccagaatctcattaaagcttatttattgtacctccagcggctgtgtgcaatggggtcttttgtggaaatcaaggagcagacaggtttcatgtgtactgtcaccacgtgggatggaaccagaggcatggaagcaagacgctaaatgaagagggccataagggctgggattcccaggcaccttaggaacagcttgtctttttttttttcctctccaaaaaaaatgtttaagggacggtgtctcctgtcacccaggctggagtgcaatggcacgatcatagctcattgcagcctctaactccggggctcaagcaatcctcccacctcagcctaccaagtagctgtgaccacagctgcccctcaccatgctaagctaatttttttaattagatagtacataaacgtcccaaaattagaagataaaaagacatgagggatccattctaatttgtgtttggagtgtaatggtccagctccattcttctgcacatggatatccagttttacacaacactgtgaatgtaatgaatgccactgaatcatacactcaaaaatagctaaaatggcaaattgtctgttatctctttttaaccaccatttttgaaaattaattataccaaaaaaccattgaatagtgcactttatttatttatttatttgtttatttatttatttattttagaaataagagtctcactttgttgcccaggctggagtgcggtggcgtgatcatggctcattgcagcctcgacctgctgggctcgggctatccttccatctcagcctcccgagtagctgggactataggtgggcgccaccccacctggctaaatctctttttaacttttgtagagataggcatctcgctatgttgcctaggctgggctggaactcctgggctcaagtgctcctcctgccttggcctcccaaagcgctaggattacagatgtgagccaccgcgcccaccctgaaccttactttttttgctcagtttctggtaattcagagaatgcctcctgagttgttctacacccacctcatattccatgggagggctgtacagggcttttttaacgaggcctctaaggacaggcatttgtatcctttccagcctttcactattacaatgttgtagtgaataactttacacactgtcatttattttacttttttttttttttattttagagaaaggaatcttgccatcttgcccaggctggtctcaaattcctgggcccaaacaatcctcccgccttggcctcctaaagtactgggatttataggcataagccaccgtgcctggccaatgcacactgtcatttagctcatgttaacacctgagtgtaggacacactcctggaggtggaattgctgggccaaagagtatgtttcttgtcattgtgatagatattgacaaatgaaccctcacagaagttgtgctgagttctgttcccaccagcgacgtaggcgatgacctttttctggagggagggggcatccttggagtccacagagccaggaatggagagtgggcccagaattttggtataggtgttgtataaacttatagtaaggttaagaaaaccgccactatccttatcagagacttggcggggggcagggtatgatggagatcataaggaggctaaaacactccacaccctccctctgcattgctcctgcacaggagtcgggaatcttttcaggttgatacgatctcaccttgaggagctgtgaggtcccagaagcctctgggttgcagattgcttggggtgaaaatgtctgtgctactgaaatctaactttttacaaaaaattacgggctgggcgcagtggctcacgcctgtaatcccagcactttgggaggctgcagcgggtggatcacttgaggtaaggagttcaagaccagaccatagtgaaaccgtgtctctacaaaaaaaattagccaggtgtggtggtgcatgcttgtaatcccagctactcagaaggctgaggtgggagaatcccttgaacccgggaagtggaggctggagtaaaccatgatcgagttactgcactccagcctgggtgacaagagtgagactctgtctccaaaaaaaaaaaaaaaaaaaaaaaaaactggattgcctggctctactccgggcacagcatgcaggcccagttctgctgctctgctgtttgttctgctttcctccacatattggcatcaccctctggtgccaagatggctgctgcattccaggcatcacatccagactcagacccagagaagctgcccatccctacctgggtgagcctttgtaggaacgagaaaccgcatccagcagcagaaacctcacccagcagcgtcttttccggtctcattcaccagcgccgcccaccgctcaaccaatccctggccaaaagaatgggaccgcctggaaggctggaccaaacaggacctgccctctggggctggggagaggcccagatgaaggctgcaggacaggatggactcctagacctctgttaccagcagtgactacctctgtctgggtggttggaacatgtttgaattttattctaagtactgtctacaagttctgcaataaaccttgactcttcttttaataatgcaaa

SEQ ID NO: 452 - protein, 417 aa, Homo sapiens
MARAMAAAWPLLLVALLVLSWPPPGTGDVVVQAPTQVPGFLGDSVTLPCYLQVPNMEVTHVSQLTWARHGESGSMAVFHQTQGPSYSESKRLEFVAARLGAELRNASLRMFGLRVEDEGNYTCLFVTFPQGSRSVDIWLRVLAKPQNTAEVQKVQLTGEPVPMARCVSTGGRPPAQITWHSDLGGMPNTSQVPGFLSGTVTVTSLWILVPSSQVDGKNVTCKVEHESFEKPQLLTVNLTVYYPPEVSISGYDNNWYLGQNEATLTCDARSNPEPTGYNWSTTMGPLPPFAVAQGAQLLIRPVDKPINTTLICNVTNALGARQAELTVQVKEGPPSEHSGISRNAIIFLVLGILVFLILLGIGIYFYWSKCSREVLWHCHLCPSSTEHASASANGHVSYSAVSRENSSSQDPQTEGTR

SEQ ID NO: 453 - DNA, 1535 bp, Homo sapiens
  CDS (571)..(1230)
cggccgccatcttggcccaactgctcccctcactccagttgctcagcccgccgctgagcacagccaatccgcggccgtccactcactgtttcggccaatcaccgagcagacggcccggaagctcgagaggctcgtgccaggtcggggggcgaaggcgaggccagaccaccaagcaggggcgtcaccaagggaaagccaatcaccattatttctgaagcccaagggggcgggacgagaagtcaacataatggtggtgctgctggaaatctagcacctggggagagcctgagacttgtgtatctaattgcctattggacacctccatctgggtaaacccaggcatccagaactttccctcaagacttacctccctcagtgcaggtcgggctggcctcacgcatttcgcttggatgcctaaatctgtctccacgtggggccggtcgataaaacaacacttcccagaatacgctgcgatccattcgcggtctgcacccggaaagtacacctcccaggggtctgtgcgcgcctccagggaacgggtcttgtggctttgtctcccgcgaagaggagatggcggagtcgttgaggtctccgcgccgctccctgtacaaactggtgggctcgccgccttggaaagaggctttccggcagagatgcctggagagaatgagaaacagccgggacaggctcctaaacaggtaccgccaggctggaagcagtgggccagggaattctcagaacagctttctagttcaagaggtgatggaagaagagtggaatgctttgcagtcagtggagaattgtccagaagacttggctcagctggaggagctgatagacatggctgtgctggaggaaattcaacaggagctgatcaagcaagagcagtccatcatcagcgagtatgagaagagcttgcagtttgatgaaaagtgtctcagcatcatgctggctgagtgggaggcaaacccactcatctgtcctgtatgtacaaagtacaacctgagaatcacaagcggtgtggtggtgtgtcagtgtggcctgtccatcccatctcattcttctgagttgacagagcagaagcttcgtgcctgtttagagggtagtataaatgagcacagtgcacattgtccccacacacctgaattttcagtcactggaggaacagaagaaaagtccagtcttctcatgagctgtctggcctgtgatacttgggctgtgatcctctagagccagcttggactcacatcattctatggggttgaagacaactcattccctctgaggagccttgtacatacaagccttttatttataacttattttgtattgaaacttttaaacaatactgaagaaaaaaaaacttttccgacatctgttcttggtcttttgtgacgcaggttgaagggggaggaatagaaaaagacaaactgccttggaggagataaaccaattttatgtctatcatgttatacaaaaatctagaaataatagatttgtacagaaaaaaatgataataaatgagaacacaaaac

SEQ ID NO: 454 - protein, 219 aa, Homo sapiens
MAESLRSPRRSLYKLVGSPPWKEAFRQRCLERMRNSRDRLLNRYRQAGSSGPGNSQNSFLVQEVMEEEWNALQSVENCPEDLAQLEELIDMAVLEEIQQELIKQEQSIISEYEKSLQFDEKCLSIMLAEWEANPLICPVCTKYNLRITSGVVVCQCGLSIPSHSSELTEQKLRACLEGSINEHSAHCPHTPEFSVTGGTEEKSSLLMSCLACDTWAVIL

SEQ ID NO: 455 - DNA, 1633 bp, Homo sapiens
  CDS (1)..(1506)
atgtggaagctttggagagctgaagagggcgcggcggcgctcggcggcgcgctcttcctgctgctcttcgcgctaggggtccgccagctgctgaagcagaggcggccgatgggcttccccccggggccgccggggctgccatttatcggcaacatctattccctggcagcctcatccgagcttccccatgtctacatgagaaagcagagccaggtgtacggagagatcttcagtttagatcttggaggcatatcaactgtggttctaaatggctatgatgtagtaaaggaatgccttgttcatcaaagcgaaatttttgcagacagaccatgccttcctttattcatgaagatgacaaaaatgggaggcttactcaattccagatatggccgaggatgggttgatcacagacgattagctgtaaacagttttcgatattttggatatggccaaaagtcttttgaatctaaaatcttggaagaaaccaaatttttcaatgatgctattgaaacatacaaaggtagaccttttgactttaaacagttaataacgaatgctgtttcaaacataaccaatctgatcatttttggagaacgattcacttatgaagacaccgattttcagcacatgattgagttatttagtgaaaatgtggaactagctgccagtgcctcagtcttcttgtataatgcctttccatggattggcatcctgccttttggaaaacatcaacagctgtttagaaatgcagctgtagtctatgattttctctccagactcattgaaaaagcttcagtcaacagaaagcctcagctacctcagcattttgttgatgcttatttagatgagatggatcaaggtaaaaatgacccatcatctactttctccaaagaaaacctaattttctcagtgggtgaactcatcattgctggaactgaaactacaaccaatgtgctacggtgggcgattcttttcatggccctttatcctaatattcaaggacaagttcagaaagagattgatttaattatgggccctaatgggaagccttcttgggacgacaaatgcaaaatgccttatactgaggcagttttgcatgaagttttaagattctgtaatatagttccattagggattttccatgcaacctctgaagatgcagttgtacgtggttattccattcctaaaggcacaacagtaattacaaatctttattctgtacactttgatgaaaagtactggagagacccagaagtgttccatcctgagcgatttctggacagcagtggatattttgccaagaaggaagctttggttcctttttccctaggaagaagacattgtcttggagaacacttggctcggatggaaatgttcttgttttttacagcattgcttcagaggtttcatttgcattttccacatgaactagttccagatctgaagcccaggttaggcatgacattgcagccccaaccctacctcatctgtgctgaaagacgctgaaactgcctgggatgttttcgggaacaagaatgtatatttgccttatccctgaacttggtttaatcaaatcaatgtgtgtattagaataaaagtcacagcatcaaaaagccaaaaaaaaaaaaaaaaa

SEQ ID NO: 456 - protein, 501 aa, Homo sapiens
MWKLWRAEEGAAALGGALFLLLFALGVRQLLKQRRPMGFPPGPPGLPFIGNIYSLAASSELPHVYMRKQSQVYGEIFSLDLGGISTVVLNGYDVVKECLVHQSEIFADRPCLPLFMKMTKMGGLLNSRYGRGWVDHRRLAVNSFRYFGYGQKSFESKILEETKFFNDAIETYKGRPFDFKQLITNAVSNITNLIIFGERFTYEDTDFQHMIELFSENVELAASASVFLYNAFPWIGILPFGKHQQLFRNAAVVYDFLSRLIEKASVNRKPQLPQHFVDAYLDEMDQGKNDPSSTFSKENLIFSVGELIIAGTETTTNVLRWAILFMALYPNIQGQVQKEIDLIMGPNGKPSWDDKCKMPYTEAVLHEVLRFCNIVPLGIFHATSEDAVVRGYSIPKGTTVITNLYSVHFDEKYWRDPEVFHPERFLDSSGYFAKKEALVPFSLGRRHCLGEHLARMEMFLFFTALLQRFHLHFPHELVPDLKPRLGMTLQPQPYLICAERR

SEQ ID NO: 457 - DNA, 2884 bp, Homo sapiens
  CDS (382)..(1797)
tcgattctcaagagggtttcattggtctcaacctggccccccaggcaacccacccctgattggacagtctcatcaagaaggttggtcaagagctcaagtgtttctgagaatctgggtgatttataagaaacccttagctgaatgcagggtggggagaacgaaagacaaaagcatcttttttcagaagggaaactgaaagaaagaggggaagagtattaaagaccatttctggctgggcagggcactctcagcagctcaactgcccagcgtgaccagtggccacctctgcagtgtcttccacaacctggtcttgactcgtctgctgaacaaatcctctgacctcaggccggctgtgaacgtagttcctgagagatagcaaacatgcccaacagtgagcccgcatctctgctggagctgttcaacagcatcgccacacaaggggagctcgtaaggtccctcaaagcgggaaatgcgtcaaaggatgaaattgattctgcagtaaagatgttggtgtcattaaaaatgagctacaaagctgccgcgggggaggattacaaggctgactgtcctccagggaacccagcacctaccagtaatcatggcccagatgccacagaagctgaagaggattttgtggacccatggacagtacagacaagcagtgcaaaaggcatagactacgataagctcattgttcggtttggaagtagtaaaattgacaaagagctaataaaccgaatagagagagccaccggccaaagaccacaccacttcctgcgcagaggcatcttcttctcacacagagatatgaatcaggttcttgatgcctatgaaaataagaagccattttatctgtacacgggccggggcccctcttctgaagcaatgcatgtaggtcacctcattccatttattttcacaaagtggctccaggatgtatttaacgtgcccttggtcatccagatgacggatgacgagaagtatctgtggaaggacctgaccctggaccaggcctatagctatgctgtggagaatgccaaggacatcatcgcctgtggctttgacatcaacaagactttcatattctctgacctggactacatggggatgagctcaggtttctacaaaaatgtggtgaagattcaaaagcatgttaccttcaaccaagtgaaaggcattttcggcttcactgacagcgactgcattgggaagatcagttttcctgccatccaggctgctccctccttcagcaactcattcccacagatcttccgagacaggacggatatccagtgccttatcccatgtgccattgaccaggatccttactttagaatgacaagggacgtcgcccccaggatcggctatcctaaaccagccctgctgcactccaccttcttcccagccctgcagggcgcccagaccaaaatgagtgccagcgaccccaactcctccatcttcctcaccgacacggccaagcagatcaaaaccaaggtcaataagcatgcgttttctggagggagagacaccatcgaggagcacaggcagtttgggggcaactgtgatgtggacgtgtctttcatgtacctgaccttcttcctcgaggacgacgacaagctcgagcagatcaggaaggattacaccagcggagccatgctcaccggtgagctcaagaaggcactcatagaggttctgcagcccttgatcgcagagcaccaggcccggcgcaaggaggtcacggatgagatagtgaaagagttcatgactccccggaagctgtccttcgactttcagtagcactcgttttacatatgcttataaaagaagtgatgtatcagtaatgtatcaataatcccagcccagtcaaagcaccgccacctgtaggcttctgtctcatggtaattactgggcctggcctctgtaagcctgtgtatgttatcaatactgtttcttcctgtgagttccattatttctatctcttatgggcaaagcattgtgggtaattggtgctggctaacattgcatggtcggatagagaagtccagctgtgagtctctccccaaagcagccccacagtggagcctttggctggaagtccatgggccaccctgttcttgtccatggaggactccgagggttccaagtatactcttaagacccactctgtttaaaaatatatattctatgtatgcgtatatggaattgaaatgtcattattgtaacctagaaagtgctttgaaatattgatgtggggaggtttattgagcacaagatgtatttcagcccatgccccctcccaaaaagaaattgataagtaaaagcttcgttatacatttgactaagaaatcacccagctttaaagctgcttttaacaatgaagattgaacagagttcagcaattttgattaaattaagacttgggggtgaaactttccagtttactgaactccagaccatgcatgtagtccactccagaaatcatgctcgcttcccttggcacaccagtgttctcctgccaaatgaccctagaccctctgtcctgcagagtcagggtggcttttcccctgactgtgtccgatgccaaggagtcctggcctccgcagatgcttcattttgacccttggctgcagtggaagtcagcacagagcagtgccctggctgtgtccctggacgggtggacttagctagggagaaagtcgaggcagcagccctcgaggccctcacagatgtctaggcaggcctcatttcatcacgcagcatgtgcaggcctggaagagcaaagccaaatctcagggaagtccttggttgatgtatctgggtctcctctggagcactctgccctcctgtcacccagtagagtaaataaacttccttggctcctgct

SEQ ID NO: 458 - protein, 471 aa, Homo sapiens
MPNSEPASLLELFNSIATQGELVRSLKAGNASKDEIDSAVKMLVSLKMSYKAAAGEDYKADCPPGNPAPTSNHGPDATEAEEDFVDPWTVQTSSAKGIDYDKLIVRFGSSKIDKELINRIERATGQRPHHFLRRGIFFSHRDMNQVLDAYENKKPFYLYTGRGPSSEAMHVGHLIPFIFTKWLQDVFNVPLVIQMTDDEKYLWKDLTLDQAYSYAVENAKDIIACGFDINKTFIFSDLDYMGMSSGFYKNVVKIQKHVTFNQVKGIFGFTDSDCIGKISFPAIQAAPSFSNSFPQIFRDRTDIQCLIPCAIDQDPYFRMTRDVAPRIGYPKPALLHSTFFPALQGAQTKMSASDPNSSIFLTDTAKQIKTKVNKHAFSGGRDTIEEHRQFGGNCDVDVSFMYLTFFLEDDDKLEQIRKDYTSGAMLTGELKKALIEVLQPLIAEHQARRKEVTDEIVKEFMTPRKLSFDFQ

SEQ ID NO: 459 - DNA, 4563 bp, Homo sapiens
  CDS (142)..(3891)
ccctttcttctcttccagggctccgctttatttgctctcagaagtcggtttcctttccttttcttcagtgaatcggagctcagagcgttgcttcggtttccctccagacagttaggaatctgaaataaacaggaaagcactatgtcttcaatgtggtctgaatatacaattggtggggtgaagatttactttccttataaagcttacccgtcacagcttgctatgatgaattctattctcagaggattaaacagcaagcaacattgtttgttggagagtcccacaggaagtggaaaaagcttagccttactttgttctgctttagcatggcaacaatctcttagtgggaaaccagcagatgagggcgtaagtgaaaaagctgaagtacaattgtcatgttgttgtgcatgccattcaaaggattttacaaacaatgacatgaaccaaggaacttcacgtcatttcaactatccaagcacaccaccttctgaaagaaatggcacttcatcaacttgtcaagactcccctgaaaaaaccactctggctgcaaagttatctgctaagaaacaggcatccatatacagagatgaaaatgatgattttcaagtagagaagaaaagaattcgacccttagaaactacacagcagattagaaaacgtcattgctttggaacagaagtacacaatttggatgcaaaagttgattcaggaaagactgtaaaactcaactctccactggaaaagataaactccttttcgccacagaaaccccctggccactgttctaggtgctgttgttctactaaacaaggaaacagtcaagagtcatcgaataccattaagaaggatcatacagggaaatccaagatacccaaaatatattttgggacacgcacacacaagcagattgctcagattactagagagctccggaggacggcatattcaggggttccaatgactattctttccagcagggatcatacttgtgtccatcctgaggtagtcggtaacttcaacagaaatgagaagtgcatggaattgctagatgggaaaaacggaaaatcctgctatttttatcatggagttcataaaattagtgatcagcacacattacagactttccaagggatgtgcaaagcctgggatatagaagaacttgtcagcctggggaagaaactaaaggcctgtccatattacacagcccgagaactaatacaagatgctgacatcatattttgtccctacaactatcttctagatgcacaaataagggaaagtatggatttaaatctgaaagaacaggttgtcattttagatgaagctcataacatcgaggactgtgctcgggaatcagcaagttacagtgtaacagaagttcagcttcggtttgctcgggatgaactagatagtatggtcaacaataatataaggaagaaagatcatgaacccctacgagctgtgtgctgtagcctcattaattggttagaagcaaacgctgaatatcttgtagaaagagattatgaatcagcttgtaaaatatggagtggaaatgaaatgctcttaactttacacaaaatgggtatcaccactgctacttttcccattttgcagggacatttttctgctgttcttcaaaaagaggaaaaaatctcaccaatttatggtaaagaggaggcaagagaagtacctgttattagtgcatcaactcaaataatgcttaaaggactttttatggtacttgactatctttttaggcaaaatagcagatttgcagatgattataaaattgcgattcaacagacttactcctggacaaatcagattgatatttcagacaaaaatgggttgttggttctaccaaaaaataagaaacgttcacgacagaaaactgcagttcatgtgctaaacttttggtgcttaaatccagctgtggccttttcagatattaatggcaaagttcagaccattgttttgacatctggtacattatcaccaatgaaatccttttcgtcagaacttggtgttacatttactatccagctggaggctaatcatatcattaaaaattcacaggtttgggttggtaccattgggtcaggccccaagggtcggaatctctgtgctaccttccagaatactgaaacatttgagttccaagatgaagtgggagcacttttgttatctgtgtgccagactgtgagccaaggaattttgtgtttcttgccatcttacaagttattagaaaaattaaaagaacgttggctctctactggtttatggcataatctggagttggtgaagacagtcattgtagaaccacagggaggagaaaaaacaaattttgatgaattactgcaggtgtactatgacgcaatcaaatacaaaggagagaaagatggagctctcctggtagcagtttgtcgtggtaaagtgagtgagggtctggatttctcagatgacaatgcccgtgctgtcataacaataggaattccttttccaaatgtgaaagatctacaggttgaactaaaacgacaatacaatgaccaccattcaaaattgagaggtcttctacctggccgtcagtggtatgaaattcaagcatacagggccttaaaccaggcccttggtagatgtattagacacagaaatgattggggagctcttattctagtggatgatcgctttaggaataacccaagtcgctatatatctggactttctaaatgggtacggcagcagattcagcaccattcaacctttgaaagtgcactggagtccttggctgaattttccaaaaagcatcaaaaagttcttaatgtatccataaaggacagaaccaatatacaggacaatgagtctacacttgaagtgacctctttaaagtacagtaccccaccttatttactggaagcagcaagtcatctatcaccagaaaattttgtggaagatgaagcaaagatatgtgtccaggaactacagtgtcctaaaattattaccaaaaattcacctctaccaagtagcattatctccagaaaggagaaaaatgatccagtattcctggaagaagcagggaaagcagaaaaaattgtgatttccagatccacaagcccaactttcaacaaacaaacaaagagagttagctggtcaagctttaattctttgggacagtattttactggtaaaataccgaaggcaacacctgagctcgggtcatcagagaatagtgcctctagtcctccccgtttcaaaacagagaagatggaaagtaaaactgttttgcccttcactgataaatgtgaatcctcaaatctgacagtaaacacatcgtttggatcatgccctcaatcagaaaccattatttcatcattaaagattgatgccacccttactagaaaaaatcattctgaacatccgctctgttctgaagaagccctggatccagacattgaattgtctctagtaagtgaagaagataaacagtccacttcaaatagagattttgaaacagaagcagaagatgaatctatctattttacacctgaactttacgatcctgaagatacagatgaagaaaaaaatgacctagctgaaactgatagaggaaatagattggctaacaattcagattgcattttagctaaagacctttttgaaattagaactataaaagaagtagattcagccagagaagtgaaagctgaggattgcatagatacaaagttgaatggaattctgcatattgaagaaagtaaaattgatgacattgatggtaatgtaaaaacaacttggataaatgaactggaactgggaaaaactcatgaaatagaaataaagaactttaaaccatctccttccaaaaataaaggcatgtttcctggttttaagtaataatacttaactctcaagctaagtaaaaatatgtcatcatgcttatgttaaactctgttgtaagtaataatttgtaaattgaataagtggcatactttttaaaaaactattttatgttcagaaatgtaaatgttattattcttgagtttttgggtttctttttttgagacagagtcttggtctgttgcccaggctggaatgcagtggtgtgctctgggctcactgcaaccttcacctccaggttcaagtgattctcctgcctcagccttctgagtagctgggactacaggtgtgcaccaccatgcccagctagtttttgtatttttagtagagatggggtttcaccatgttggccaggctggtctcgaactcctggcctcgtgatctgcccttctctgcctccctaagttgctgggattacaggtgtgagccacagtgcctggcccattcttgagttttgataaagtaattcatacaaagtattgtcctcaaataagtcttccttagctaaatgcaatttaaaattattcaaagatcctagggcacttctagtttcacgtaaatattcatattaggtggttctcttcatccatttgttttcacactgatacataaaaattaacagcagtctaatctagtgacacctcagtcatatttcgctatagattttac

SEQ ID NO: 460 - protein, 1249 aa, Homo sapiens
MSSMWSEYTIGGVKIYFPYKAYPSQLAMMNSILRGLNSKQHCLLESPTGSGKSLALLCSALAWQQSLSGKPADEGVSEKAEVQLSCCCACHSKDFTNNDMNQGTSRHFNYPSTPPSERNGTSSTCQDSPEKTTLAAKLSAKKQASIYRDENDDFQVEKKRIRPLETTQQIRKRHCFGTEVHNLDAKVDSGKTVKLNSPLEKINSFSPQKPPGHCSRCCCSTKQGNSQESSNTIKKDHTGKSKIPKIYFGTRTHKQIAQITRELRRTAYSGVPMTILSSRDHTCVHPEVVGNFNRNEKCMELLDGKNGKSCYFYHGVHKISDQHTLQTFQGMCKAWDIEELVSLGKKLKACPYYTARELIQDADIIFCPYNYLLDAQIRESMDLNLKEQVVILDEAHNIEDCARESASYSVTEVQLRFARDELDSMVNNNIRKKDHEPLRAVCCSLINWLEANAEYLVERDYESACKIWSGNEMLLTLHKMGITTATFPILQGHFSAVLQKEEKISPIYGKEEAREVPVISASTQIMLKGLFMVLDYLFRQNSRFADDYKIAIQQTYSWTNQIDISDKNGLLVLPKNKKRSRQKTAVHVLNFWCLNPAVAFSDINGKVQTIVLTSGTLSPMKSFSSELGVTFTIQLEANHIIKNSQVWVGTIGSGPKGRNLCATFQNTETFEFQDEVGALLLSVCQTVSQGILCFLPSYKLLEKLKERWLSTGLWHNLELVKTVIVEPQGGEKTNFDELLQVYYDAIKYKGEKDGALLVAVCRGKVSEGLDFSDDNARAVITIGIPFPNVKDLQVELKRQYNDHHSKLRGLLPGRQWYEIQAYRALNQALGRCIRHRNDWGALILVDDRFRNNPSRYISGLSKWVRQQIQHHSTFESALESLAEFSKKHQKVLNVSIKDRTNIQDNESTLEVTSLKYSTPPYLLEAASHLSPENFVEDEAKICVQELQCPKIITKNSPLPSSIISRKEKNDPVFLEEAGKAEKIVISRSTSPTFNKQTKRVSWSSFNSLGQYFTGKIPKATPELGSSENSASSPPRFKTEKMESKTVLPFTDKCESSNLTVNTSFGSCPQSETIISSLKIDATLTRKNHSEHPLCSEEALDPDIELSLVSEEDKQSTSNRDFETEAEDESIYFTPELYDPEDTDEEKNDLAETDRGNRLANNSDCILAKDLFEIRTIKEVDSAREVKAEDCIDTKLNGILHIEESKIDDIDGNVKTTWINELELGKTHEIEIKNFKPSPSKNKGMFPGFK

SEQ ID NO: 461 - DNA, 796 bp, Homo sapiens
  CDS (9)..(746)
cgcagatcatgggtggcgggtatgatctcaacctcttcgccagccctcctgacagcaacttcgtgtgctccgtctgccatggggttctcaagaggccagcaaggttgccatgcagccacatcttctgcaaaaagtgcatcctccggtggctagccagacaaaagacctgtccgtgctgtaggaaagaggtgaaaaggaaaaaggttgtccacatgaataaactccggaaaaccattggccgcctggaagtcaagtgcaagaacgccgacgctggctgcatagtgacatgccccctggcccatcgcaaggggcaccaggactcatgcccctttgagctaacggcctgccccaacgagggctgcacctcgcaggtgccgcgtgggaccctggcagagcaccggcagcattgccagcaagggtcccagcagcgctgccccctgggctgcggggccaccctggacccggccgagcgtgctcgccacaactgctaccgggagctgcacaacgcctggagcgtgcgccaggagcgccgtcggcccctgctgctgtccctcctgcggcgtgtgcgctggctggaccaagccaccagtgtcgttcgtagagagctggcggagctcagcaacttcctggaggaagacaccgctctgctggagggtgccccacaggaggaggccgaggctgccccagaaggcaacgttggggctgaggtggtgggggagcccagggccaacataccttgtaaataggtaaataaaagcagacccccggcctgcctgcctctgtgcctgcggccctc

SEQ ID NO: 462 - protein, 245 aa, Homo sapiens
MGGGYDLNLFASPPDSNFVCSVCHGVLKRPARLPCSHIFCKKCILRWLARQKTCPCCRKEVKRKKVVHMNKLRKTIGRLEVKCKNADAGCIVTCPLAHRKGHQDSCPFELTACPNEGCTSQVPRGTLAEHRQHCQQGSQQRCPLGCGATLDPAERARHNCYRELHNAWSVRQERRRPLLLSLLRRVRWLDQATSVVRRELAELSNFLEEDTALLEGAPQEEAEAAPEGNVGAEVVGEPRANIPCK

SEQ ID NO: 463 - DNA, 2603 bp, Homo sapiens
  CDS (700)..(1563)
attaatccctgagacaaaggtactgaaggcaagtggctgaagaacaggcttgattggacagatgacttggagatgttcactggacagggacagccttgtgaagatctttgtgaatacccgacctcgcaagctccagagactacaataattcacttgccctaggttccaaagccagcaagtggaaaacggagactggaattccgcccacaggactccaaagcctgtgcagcaacaccccactcccccggcaggatcaccagcaggacgcgcgggagccaggaagtaagatccgtacctccaaggctcccatgggcccaagcctccgcatcaacagactgggagggattacgtggggtcccagggccggctctgaggcgggaaaactttctggaggcggcggcctcaggccggagcgggcgcacaccgactggaggggtcggattcagggatgtgggtggaccgcatttccccatcttccccgccgcgcacttcctctggtgcaatctccacaccccgcgccggcccgcctgcaacgcgccctggcactcaccggtgggcgaaatttccccgcctccacgtgagagccagctccgccgtgacccggaagtccacttcgagtcgccggcccaccctctcgggttccggcttcttccgggtcgcggccttccggcgaacgcggttaccgtggaaaccgcggccatggcggcaccgcggcaaatccccagccacatagtgcgcctcaagcccagctgctctacagactcgtcgttcacccggacgccggtgcccaccgtgtctctcgcgtcccgcgagctgcctgtctcgtcgtggcaggtcaccgagccgtcaagcaagaatctgtgggagcagatctgcaaggagtatgaagctgagcagcctccctttccagaaggatataaagtcaaacaggagcctgtgattacggttgcgccagtagaggaaatgctttttcatggcttcagtgcagagcactattttccggtttcccatttcaccatgatctcacgtacaccctgtcctcaagataaatcggaaacaatcaacccaaaaacatgttctcccaaagaatatttggaaactttcatctttcctgttctgcttcccggaatggctagcctgcttcaccaagcgaagaaagaaaaatgttttgagaggaaaagaaccaaattcattgcctgtgattttctgactgagtggttatacaaccaaaatccaaagagggcaggggagccattcacagaatttttctccattccatttgtggaggagcggctaaagcaacacccacggccgccaatcccactctcgctcctgctgacagaagaggaagcagccctctacattcaatccttctggagagcctgtgtggttcgctgtgatcctgagattcaagaactgcgtcagtggcagaagaaacttcgcgaggccaagcacattcaccagcaagtcaaaattttctgggccaagcaagaacaaaaagtgaaatgcaaaatggaggacgatgcagtacctgcagccaagatgaaaattccatcatcttaaccatagctaagacgtatctttgcccattcgagcacaagttaccttgtgcaaggaaaatgtccaaatgatgctctctctcttgtgatttctttaacaagacttggaacatgtgcaaatggaatcttttctgtacaagataggattcattgcaaacaagctttaatgcaaatagtttagaaaagaaaggaccagtcttcactttctgcattatccccacattttattcattcatccagattacttcttcagtgcctcaggagtattcttctacaccagctgctgttaaaatgtacaatgaactctagtcccaaggaatacagaagtgctcttattaccagttttcccacttgtggccgcctttgcaaagatccatattctaatttaagtccccaacctctgaatttggttttaagtttacctagtgactgactactctctttataaaaaagaccttatacttaatgatcatttccaaaggagaccactccttaacttttactgcaaacccaacaagatgagacacttaaacccagacagatgtaacaaaggatttttgttgtctaagtcccaaagtattatatagaaagttcctgcttttatgggtaaacttattaccttaatatgttctgtggtttgctgttaaccaagattctcccatttaaaatgccacagaccgaccctcaaggcagatccgaaagcctagtagttagttgcactgggttgttttgacaagctaccacacgtcttaagtaaatagtaaagcctttatttttgtgttaagaacagcattttgaaaataaaacctatctgcccatgctttacagccttttaaatttgtaatatttatatagtcgtttatggtacatattgattgtcttgaaatttctttaacttcttttttataagtatgcaacagtcagccgggggaagataaaggtacattataaaacacacattaatgcatttaataaatatatattatctatcaaaaaaaaaaaaaaaaaaaaaaaaaaaaaaaaaaaaaaaaaaaaaaaaaaaaa

SEQ ID NO: 464 - protein, 287 aa, Homo sapiens
MAAPRQIPSHIVRLKPSCSTDSSFTRTPVPTVSLASRELPVSSWQVTEPSSKNLWEQICKEYEAEQPPFPEGYKVKQEPVITVAPVEEMLFHGFSAEHYFPVSHFTMISRTPCPQDKSETINPKTCSPKEYLETFIFPVLLPGMASLLHQAKKEKCFERKRTKFIACDFLTEWLYNQNPKRAGEPFTEFFSIPFVEERLKQHPRPPIPLSLLLTEEEAALYIQSFWRACVVRCDPEIQELRQWQKKLREAKHIHQQVKIFWAKQEQKVKCKMEDDAVPAAKMKIPSS

SEQ ID NO: 465 - DNA, 3396 bp, Homo sapiens
  CDS (264)..(812)
cattaccaacgaggcgcaggggtcaggacgactctcggcagcgccattgcgcgccctctagtggcagccggttttgaggccggcctccggctttgaagttcctcaccgcgtctccttccctctccccaaagcctggatcaccgcccagcgtcaggcgaggggcgacgtctcgaggtaaaacggaggaggtgcgggacgcggagactgcgcgggcccggtagccctggagaggccgaggctctaggccgcgaggggcgggtgcaatggcggaggaacaggtgaaccgcagcgccggcctggcccccgactgtgaggcctcggcgactgcagaaactacggtttcctcagtggggacctgtgaagccgctggcaagtcaccagagcccaaggactacgacagcacctgcgtgttctgccggatcgcggggcggcaggacccgggcaccgaactcctgcactgcgagaatgaggacctaatttgcttcaaagatatcaaaccagcagcaactcatcattatcttgtggtgccaaagaagcatattggaaactgcagaactctaaggaaagatcaagtagaactggttgagaacatggtaactgttggaaaaaccattcttgaaagaaataatttcactgacttcacgaatgtgaggatgggttttcatatgccaccattctgttccatttcccacttgcaccttcatgttctggcaccagtggatcagcttggcttcttatccaagttggtttatagagtcaattcctattggtttatcacagctgatcacttgattgaaaaactaagaacatgaaaatgtcaagagtggaagatttttctaatcttggttcagcatgaagtggtatttaggtcccttttaagtctaattgcaattttaagatttgttgggttttatgagaggctgttacttagtggccttaaatcttttctgaatgtctgtttcctaagatctgtgatacagttatgtgaatattttgttactgacttgtttcaatggttacttgtataaggattttatatatatgatactatagataaaatcctatttaagacaaattctgttaatcaacaagggctctgtatttttttaagttaaaatattttcatttctcagtaagtagtcagttataatagtgatttatttatgaagaataaactactatagaaagtactttgtgggaacctttattactgtgaaggagaaaaatagctatttcttgacagttctatagttatacacataaattttcaaaataaagaataccatactacacaatgatctctgattttgctgagggaaggaattatatatgtgccactttttcctcaaatttcagatgccagttttcactttttgaagcattgcatctttttaataaatctatcctgaaagctatataatatatataatttatatcaatgaatttacaataactatcaaattggctatcagaattcactgtaatggaattttgcctctaataacataaagggggaagaaacataaagtggttctcttaataaaactagcagaaaatgttgctttatggcatgtttttgtatcaaagagaaatcagaggttaaactttgcttttatcatgaaaagggcctgatttgaaggtagagataggcttagatgagaaaaattgataacgcaatgttaatactattgatatttcataggtatattttgttagaaattggttttttggtgctaatctataggcacaatagtgaatatgaatgaagagtaggtgctgcaagttaatcctacattgtgccagtgtatattagtaccatgtaaatgaatatgaataaatgaacatgaggattaacgaactgttgaaaataggctgagatactagttttctttcttttttagagggggcatgatattaaagatagttttaagtaacaaattacttattacaaagttacaacatgtggaatcaatagttttatttgttcattaatttattcattcagcaaacatttgttgaacatttaatgtgtaccagatattgccaggatcaggaaataaagaactaaaaatggacattcagactgcaattgctagtacaggggtcaaacaaaatcagtgattagaatttagtgcgttaagttccctgatgccttcacagccagaagaggctgtgaagggataaacacttctgagagtgggtggtagtagaactgagtattcaagactgaatgttaggcaggtagacagtgactggttaggctgagaaacttacaagtattttcgttgagttctgcttccactattatttactttacaatggatatgaagttcagatttcatcttatttactgaaggtggagaaaggatgtggaagtaggggttatgggctctcaaaagtagatttagagagatttttttatcactgttttatgatatagttcactgagcacttacatagattaacagttacaagtttccataaatcagttagaatatgactagcttcagggaaggaattttcaacaactgcaatctttgattgttttactgtgggaacttgcagtgatataattgacaacattatttaacaataataggtaaagtaggccgggtgtggtggctcacgcctgtaatcctagcactttgggaggccgaggtgggtggatcacaaggtcaggagttcgagaccagcctggccaatatggtgaaaccccgtctcttctaaaaaaatacaaaaattagccgggtatggtggcgcatgcctgtagtcccagctactggggaggctgaggcaagagaattgcttgaactcgggaggcggaggtcgcagtgagccgagatcgtgccactgcactccagcctgggtgacagagtgagactttgtctcaaagaaaaaaaaacaataataggtaaagtatttaaggaattctcagatgccttatggacctcttcaaaaatgtggttagccaattgattcaacttttataggtttatatgctctcatgtaaacctatttgtttccgagatcagacgagatcgggcgcgttcagggtggtatggccgtagacaacctatttgttaaaaacccttggaaacacatcttttagtagaggttcttatttacttataaagattaataatcaaattactacaattaatatccatttagccttttcagtagtctaaatatttggtaactccctagccatctataacactagttcaaaacaaggctaattcataacctgtcttaaaaatgtttgaagtggtatcaagagcattgtttatgcatgttgtgatactatttgtggaactgtttaatgagctatttcaaactgctagaagaaaatgaaataaaaatggaaaaatactgtcaaaaaaaaaaaaaaaaaaa

SEQ ID NO: 466 - protein, 182 aa, Homo sapiens
MAEEQVNRSAGLAPDCEASATAETTVSSVGTCEAAGKSPEPKDYDSTCVFCRIAGRQDPGTELLHCENEDLICFKDIKPAATHHYLVVPKKHIGNCRTLRKDQVELVENMVTVGKTILERNNFTDFTNVRMGFHMPPFCSISHLHLHVLAPVDQLGFLSKLVYRVNSYWFITADHLIEKLRT

SEQ ID NO: 467 - DNA, 1987 bp, Homo sapiens
  CDS (223)..(1701)
agccgccgccgtctccgccgtcgctggggcagctgccgcggtggtcgcctctggcagtgccgctagctttcaggcagtcgcctctcctcccgacatcccgccttgaggaggctgaggcggaatcgcggctggcggcggggggacggaccggccctgcagtggccgcagtgacagcccggacccggccctccgcccgctctcgcctcggcgcccgcagccacgatgaaccggggcggcggcagcccgtcggccgccgccaactacctgctctgtaccaactgccggaaagtgctgcggaaggataaaagaatcagagtgtctcaacccttgacaagaggaccaagtgcctttattccagagaaggaagttgtccaagcaaacacagtggatgaacgtactaactttcttgtggaagaatactctacatccggtcgtctggacaacatcacacaggtcatgagtttacacactcagtacctggagtctttcttgcggagccagttttacatgttgcgcatggatggtccccttcctctaccatacaggcactatattgcaataatggctgcagctagacatcagtgttcttacttaataaacatgcatgtggatgaatttttaaagactggaggtattgctgagtggttgaatggtttggaatatgtgccacaaagactgaaaaatcttaatgaaattaataagctgctagcacatcgaccttggctgatcacaaaagagcacattcagaaacttgtcaaaactggagaaaataattggtctctgcctgaactggtacatgctgtggtcctcctggcacattatcatgctttggcaagctttgtttttggtagtggtatcaatccagagagagatccagaaatctccaatggattcaggctaatatcagtcaacaatttctgcgtttgtgatcttgctaatgacaacaacatagagaatgcatctctttcaggcagcaactttgggattgtggattctctaagtgagctagaggccttaatggaaaggatgaaaagacttcaagaagaaagggaagatgaagaggcgtctcaagaagaaatgagcactcgttttgaaaaggagaagaaagaaagtctttttgtggtctctggagatacttttcattcatttcctcattcagattttgaggatgacatgattataacatctgatgtctctcgatatattgaagaccctggttttgggtatgaagactttgccagacgaggagaagagcatttgccaacattccgagctcaggactatacctgggaaaatcatgggttctccctggtgaacagactttattctgacattggacatcttcttgatgaaaagtttcggatggtctacaatctcacatataacactatggccacccatgaggatgttgacacaaccatgctgcgcagagctttatttaactatgttcactgtatgtttggaatcaggtatgatgactatgattatggagaagttaatcaattacttgaaagaagcctgaaggtttacattaagacagtgacctgctatcctgagagaactacaaaacgcatgtatgatagttactggcggcagttcaaacactcagaaaaagttcatgtcaatctacttttaatggaagcacgaatgcaagctgaacttctttatgctcttcgtgccataactcggcatttgacctgaagtatcacccaaggaaaatgtcatacatgtgtaaagacctttcacataagataaacattgaagctatttgtgatatagcatcaaaaattattcagttctctagtgtcaaagtttagccgtttgtttttttttttttgttttttgcggctgtaatgtgcaatgatgtgttttattttccttgatgcttaacattactaacaattgcaaaaataatactgaggagcactactttgcattgtttgtagttggagttttggatactgatcataaatcatgaatctggcgt

SEQ ID NO: 468 - protein, 492 aa, Homo sapiens
MNRGGGSPSAAANYLLCTNCRKVLRKDKRIRVSQPLTRGPSAFIPEKEVVQANTVDERTNFLVEEYSTSGRLDNITQVMSLHTQYLESFLRSQFYMLRMDGPLPLPYRHYIAIMAAARHQCSYLINMHVDEFLKTGGIAEWLNGLEYVPQRLKNLNEINKLLAHRPWLITKEHIQKLVKTGENNWSLPELVHAVVLLAHYHALASFVFGSGINPERDPEISNGFRLISVNNFCVCDLANDNNIENASLSGSNFGIVDSLSELEALMERMKRLQEEREDEEASQEEMSTRFEKEKKESLFVVSGDTFHSFPHSDFEDDMIITSDVSRYIEDPGFGYEDFARRGEEHLPTFRAQDYTWENHGFSLVNRLYSDIGHLLDEKFRMVYNLTYNTMATHEDVDTTMLRRALFNYVHCMFGIRYDDYDYGEVNQLLERSLKVYIKTVTCYPERTTKRMYDSYWRQFKHSEKVHVNLLLMEARMQAELLYALRAITRHLT

SEQ ID NO: 469 - DNA, 901 bp, Homo sapiens
  CDS (93)..(776)
cccaaagtacttgtgtccgggtggtggactggattagctgcggagccctggaagctgcctgtccttctccctgtgcttaaccagaggtgcccatgggttggacaatgaggctggtcacagcagcactgttactgggtctcatgatggtggtcactggagacgaggatgagaacagcccgtgtgcccatgaggccctcttggacgaggacaccctcttttgccagggccttgaagttttctacccagagttggggaacattggctgcaaggttgttcctgattgtaacaactacagacagaagatcacctcctggatggagccgatagtcaagttcccgggggccgtggacggcgcaacctatatcctggtgatggtggatccagatgcccctagcagagcagaacccagacagagattctggagacattggctggtaacagatatcaagggcgccgacctgaagaaagggaagattcagggccaggagttatcagcctaccaggctccctccccaccggcacacagtggcttccatcgctaccagttctttgtctatcttcaggaaggaaaagtcatctctctccttcccaaggaaaacaaaactcgaggctcttggaaaatggacagatttctgaaccgtttccacctgggcgaacctgaagcaagcacccagttcatgacccagaactaccaggactcaccaaccctccaggctcccagagaaagggccagcgagcccaagcacaaaaaccaggcggagatagctgcctgctagatagccggctttgccatccgggcatgtggccacactgcccaccaccgacgatgtgggtatggaaccccctctggatacagaaccccttcttttccaaataaaaaaaaaatcatccaggaaaaaaa

SEQ ID NO: 470 - protein, 227 aa, Homo sapiens
MGWTMRLVTAALLLGLMMVVTGDEDENSPCAHEALLDEDTLFCQGLEVFYPELGNIGCKVVPDCNNYRQKITSWMEPIVKFPGAVDGATYILVMVDPDAPSRAEPRQRFWRHWLVTDIKGADLKKGKIQGQELSAYQAPSPPAHSGFHRYQFFVYLQEGKVISLLPKENKTRGSWKMDRFLNRFHLGEPEASTQFMTQNYQDSPTLQAPRERASEPKHKNQAEIAAC

SEQ ID NO: 471 - DNA, 2567 bp, Homo sapiens
  CDS (354)..(2060)
gggagcgcggcgcggccgccgcgtgcgcgagccggggttgcagcccagccgggactttccagccggcggcagccgcggcggccgccggctcttccccgccccccgtcatggggcagcccggggagcagaacgctgcggaccgcggcggaggacgcgcccggcgcccctgagccggccgagcggcgacggaccgcgagatgaggaaaatgaggcccaaagaagtgatgccacttggttaaggtcccagagcaggtcagaatcagacctaggatcagaaacctggctcctggctcctggctccctactcttctaaggatcgctgtcctgacagaagagaactcctctttcctaaaatggagtcgagtaaaaagatggactctcctggcgcgctgcagactaacccgccgctaaagctgcacactgaccgcagtgctgggacgccagtttttgtccctgaacaaggaggttacaaggaaaagtttgtgaagaccgtggaggacaagtacaagtgtgagaagtgccacctggtgctgtgcagcccgaagcagaccgagtgtgggcaccgcttctgcgagagctgcatggcggccctgctgagctcttcaagtccaaaatgtacagcgtgtcaagagagcatcgttaaagataaggtgtttaaggataattgctgcaagagagaaattctggctcttcagatctattgtcggaatgaaagcagaggttgtgcagagcagttaatgctgggacatctgctggtgcatttaaaaaatgattgccattttgaagaacttccatgtgtgcgtcctgactgcaaagaaaaggtcttgaggaaagacctgcgagaccacgtggagaaggcgtgtaaataccgggaagccacatgcagccactgcaagagtcaggttccgatgatcgcgctgcagaaacacgaagacaccgactgtccctgcgtggtggtgtcctgccctcacaagtgcagcgtccagactctcctgaggagcgagttgagtgcacacttgtcagagtgtgtcaatgcccccagcacctgtagttttaagcgctatggctgcgtttttcaggggacaaaccagcagatcaaggcccacgaggccagctccgccgtgcagcacgtcaacctgctgaaggagtggagcaactcgctcgaaaagaaggtttccttgttgcagaatgaaagtgtagaaaaaaacaagagcatacaaagtttgcacaatcagatatgtagctttgaaattgaaattgagagacaaaaggaaatgcttcgaaataatgaatccaaaatccttcatttacagcgagtgatagacagccaagcagagaaactgaaggagcttgacaaggagatccggcccttccggcagaactgggaggaagcagacagcatgaagagcagcgtggagtccctccagaaccgcgtgaccgagctggagagcgtggacaagagcgcggggcaagtggctcggaacacaggcctgctggagtcccagctgagccggcatgaccagatgctgagtgtgcacgacatccgcctagccgacatggacctgcgcttccaggtcctggagaccgccagctacaatggagtgctcatctggaagattcgcgactacaagcggcggaagcaggaggccgtcatggggaagaccctgtccctttacagccagcctttctacactggttactttggctataagatgtgtgccagggtctacctgaacggggacgggatggggaaggggacgcacttgtcgctgttttttgtcatcatgcgtggagaatatgatgccctgcttccttggccgtttaagcagaaagtgacactcatgctgatggatcaggggtcctctcgacgtcatttgggagatgcattcaagcccgaccccaacagcagcagcttcaagaagcccactggagagatgaatatcgcctctggctgcccagtctttgtggcccaaactgttctagaaaatgggacatatattaaagatgatacaatttttattaaagtcatagtggatacttcggatctgcccgatccctgataagtagctggggaggtggatttagcagaaggcaactcctctgggggatttgaaccggtctgtcttcactgaggtcctcgcgctcagaaaaggaccttgtgagacggaggaagcggcagaaggcggacgcgtgccggcgggaggagccacgcgtgagcacacctgacacgttttataatagactagccacacttcactctgaagaattatttatccttcaacaagataaatattgctgtcagagaaggttttcattttcatttttaaagatctagttaattaaggtggaaaacatatatgctaaacaaaagaaacatgatttttcttccttaaacttgaacaccaaaaaaacacacacacacacacacgtggggatagctggacatgtcagcatgttaagtaaaaggagaatttatgaaatagtaatgcaattctgatatcttctttctaaaattcaagagtgcaattttgtttcaaatacagtatattgtctatttttaaggcctc

SEQ ID NO: 472 - protein, 568 aa, Homo sapiens
MESSKKMDSPGALQTNPPLKLHTDRSAGTPVFVPEQGGYKEKFVKTVEDKYKCEKCHLVLCSPKQTECGHRFCESCMAALLSSSSPKCTACQESIVKDKVFKDNCCKREILALQIYCRNESRGCAEQLMLGHLLVHLKNDCHFEELPCVRPDCKEKVLRKDLRDHVEKACKYREATCSHCKSQVPMIALQKHEDTDCPCVVVSCPHKCSVQTLLRSELSAHLSECVNAPSTCSFKRYGCVFQGTNQQIKAHEASSAVQHVNLLKEWSNSLEKKVSLLQNESVEKNKSIQSLHNQICSFEIEIERQKEMLRNNESKILHLQRVIDSQAEKLKELDKEIRPFRQNWEEADSMKSSVESLQNRVTELESVDKSAGQVARNTGLLESQLSRHDQMLSVHDIRLADMDLRFQVLETASYNGVLIWKIRDYKRRKQEAVMGKTLSLYSQPFYTGYFGYKMCARVYLNGDGMGKGTHLSLFFVIMRGEYDALLPWPFKQKVTLMLMDQGSSRRHLGDAFKPDPNSSSFKKPTGEMNIASGCPVFVAQTVLENGTYIKDDTIFIKVIVDTSDLPDP

SEQ ID NO: 473 - DNA, 1235 bp, Homo sapiens
  CDS (30)..(1073)
ctttcagtaatcattcaaccaacgcttccatgtctctactctgtcgtaacaaaggctgtgggcagcactttgaccctaataccaaccttcctgattcctgttgccatcaccctggggtcccaatcttccatgatgcacttaagggttggtcctgctgccgaaagcgaactgtagatttctctgagttcttaaacatcaagggctgtactatgggaccacactgtgctgagaagcttcctgaggcccctcaacctgaaggccctgctacaagcagttcacttcaggagcaaaaacctctgaatgtgattccaaagtcagcagagaccttgcgccgggagaggcccaagtcagagttgcctctgaagctgctgccgctaaatatatcccaagccctggaaatggcattggaacagaaggaattagaccaggaacctggggcaggacttgacagtctgatccggactggttccagctgccagaacccaggatgtgatgctgtttaccaaggccctgagagtgatgctactccatgtacctaccacccaggagcaccccgattccatgaggggatgaagtcttggagctgttgtggcatccagaccctggattttggggcatttttggcacaaccagggtgcagagtcggtagacatgactgggggaagcagctcccagcatcttgccgccatgattggcaccagacagattccttagtagtggtgactgtatatggccagattccacttcctgcgtttaactgggtgaaggccagtcaaactgagcttcatgtccacattgtctttgatggtaaccgtgtgttccaagcacagatgaagctctggggggtcataaacgtggagcagagctctgtcttcttgatgccatctcgggttgaaatctccctggtcaaggctgacccaggatcctgggcccagctggagcaccctgatgcactagctaagaaggctagggcaggggttgtgttagagatggatgaggaagaatctgacgattcagatgatgatctgagctggacagaggaggaggaagaggaggaagcaatgggggaatagtgacaccagacagttgatgtctagataggacctcaatgattcccttagaatcttagataccaggatattgttggccatgtggcatcattgagcagcaggaggctgaaggaggggagaacaaaattgtccaaaccatgctgtttttttcccttaaataaatct

SEQ ID NO: 474 - protein, 347 aa, Homo sapiens
MSLLCRNKGCGQHFDPNTNLPDSCCHHPGVPIFHDALKGWSCCRKRTVDFSEFLNIKGCTMGPHCAEKLPEAPQPEGPATSSSLQEQKPLNVIPKSAETLRRERPKSELPLKLLPLNISQALEMALEQKELDQEPGAGLDSLIRTGSSCQNPGCDAVYQGPESDATPCTYHPGAPRFHEGMKSWSCCGIQTLDFGAFLAQPGCRVGRHDWGKQLPASCRHDWHQTDSLVVVTVYGQIPLPAFNWVKASQTELHVHIVFDGNRVFQAQMKLWGVINVEQSSVFLMPSRVEISLVKADPGSWAQLEHPDALAKKARAGVVLEMDEEESDDSDDDLSWTEEEEEEEAMGE

SEQ ID NO: 475 - DNA, 2055 bp, Homo sapiens
  CDS (282)..(1400)
gcagagcgggcggcggcggcggcggcagcggaggcggcggctccagccggcgcggcgcgaggctcggcggtgggatccggcgggcggtgctagctccgcgctccctgcctcgctcgctgccgggggcggtcggaaggcgcggcgcgaagcccgggtggcccgagggcgcgactctagccttgtcacctcatcttgcccccttggttttggaagtcctgaagagttggtctggaggaggaggaggacattgatgtgcttggtgtgtggccagtggtgaagagatggctgctcctgtcccgtgggcctgctgtgctgtgcttgccgccgccgccgcagttgtctacgcccagagacacagtccacaggaggcaccccatgtgcagtacgagcgcctgggctctgacgtgacactgccatgtgggacagcaaactgggatgctgcggtgacgtggcgggtaaatgggacagacctggcccctgacctgctcaacggctctcagctggtgctccatggcctggaactgggccacagtggcctctacgcctgcttccaccgtgactcctggcacctgcgccaccaagtcctgctgcatgtgggcttgccgccgcgggagcctgtgctcagctgccgctccaacacttaccccaagggcttctactgcagctggcatctgcccacccccacctacattcccaacaccttcaatgtgactgtgctgcatggctccaaaattatggtctgtgagaaggacccagccctcaagaaccgctgccacattcgctacatgcacctgttctccaccatcaagtacaaggtctccataagtgtcagcaatgccctgggccacaatgccacagctatcacctttgacgagttcaccattgtgaagcctgatcctccagaaaatgtggtagcccggccagtgcccagcaaccctcgccggctggaggtgacgtggcagaccccctcgacctggcctgaccctgagtcttttcctctcaagttctttctgcgctaccgacccctcatcctggaccagtggcagcatgtggagctgtccgacggcacagcacacaccatcacagatgcctacgccgggaaggagtacattatccaggtggcagccaaggacaatgagattgggacatggagtgactggagcgtagccgcccacgctacgccctggactgaggaaccgcgacacctcaccacggaggcccaggctgcggagaccacgaccagcaccaccagctccctggcacccccacctaccacgaagatctgtgaccctggggagctgggcagcggcgggggaccctcggcacccttcttggtcagcgtccccatcactctggccctggctgccgctgccgccactgccagcagtctcttgatctgagcccggcaccccatgaggacatgcagagcacctgcagaggagcaggaggccggagctgagcctgcagaccccggtttctattttgcacacgggcaggaggaccttttgcattctcttcagacacaatttgtggagaccccggcgggcccgggcctgccgccccccagccctgccgcaccaagctggccctccttcctccctcaggggaggtgggccatgcagctaacccacccaccaaagaccccctcaccctggccccttgggctggaccctccaatgccagcgactcccaggagcccttgggggacgtgaggggagcctctcacatccgatttctcctcctgccccagcctcctgtctatcccagggtctctgttgccaccatcagattataagctcctgatgctgggggggcccagccatccccctccccccagcacccacaattttcagtcccctcccctctgccctgttttgtatacccctcccctgaccctgctcctatcccacagtatttaatgccctgtcagtcccttctagtctgactcaatggtaacttgctgtatttgaattttttatagatgtatatacagggtggggggagtgggcggttctcattaaacgtcaccatttcatgaaaaaaaaaaaaaaaaaa

SEQ ID NO: 476 - protein, 372 aa, Homo sapiens
MAAPVPWACCAVLAAAAAVVYAQRHSPQEAPHVQYERLGSDVTLPCGTANWDAAVTWRVNGTDLAPDLLNGSQLVLHGLELGHSGLYACFHRDSWHLRHQVLLHVGLPPREPVLSCRSNTYPKGFYCSWHLPTPTYIPNTFNVTVLHGSKIMVCEKDPALKNRCHIRYMHLFSTIKYKVSISVSNALGHNATAITFDEFTIVKPDPPENVVARPVPSNPRRLEVTWQTPSTWPDPESFPLKFFLRYRPLILDQWQHVELSDGTAHTITDAYAGKEYIIQVAAKDNEIGTWSDWSVAAHATPWTEEPRHLTTEAQAAETTTSTTSSLAPPPTTKICDPGELGSGGGPSAPFLVSVPITLALAAAAATASSLLI

SEQ ID NO: 477 - DNA, 2542 bp, Homo sapiens
  CDS (29)..(1705)
ggccacgttcagcggacacgggagcaagatggcgattccgggcaggcagtatgggcttattttgccaaagaaaacacagcagttgcaccctgttttgcaaaaaccatcagtgtttgggaatgattctgatgatgatgatgagacctctgtgagtgaaagccttcagagggaagctgctaagaagcaggccatgaaacagaccaaactggaaatccagaaggcccttgcagaagatgctactgtgtatgaatatgacagtatttatgatgaaatgcagaaaaaaaaggaggaaaataatcccaaattgcttttggggaaagacagaaagcccaagtatattcacaacttgctaaaagcagttgagatcagaaaaaaggaacaggaaaaaagaatggaaaagaaaatacagagagaacgagaaatggaaaagggggagtttgatgataaagaagcatttgtgacatctgcatataagaaaaaactgcaagagagagctgaagaagaagaaagagaaaagagggctgctgcactggaagcatgtttggatgtaaccaagcagaaagatctcagtggattttataggcacctattaaatcaagcagttggtgaagaggaagtacctaaatgcagctttcgtgaagccagatctggtataaaggaagaaaaatcaaggggcttctccaatgaagtaagttcaaaaaacagaataccacaagagaaatgcattcttcaaactgatgtgaaagtagaggaaaacccagatgcagacagtgacttcgatgctaagagcagtgcggatgatgaaatagaagaaactagagtgaactgcagaagggaaaaggtcatagagacccctgagaatgacttcaagcaccacaggagtcaaaaccactctcggtcacctagtgaagaaagagggcacagtaccaggcaccacacgaaaggatcacgaacgtcgagaggacatgagaaaagggaagatcagcaccagcagaagcaatccagagaccaagagaaccattacactgaccgtgattaccggaaagaaagggattctcataggcacagagaggccagtcatagagattcccattggaagaggcatgaacaggaagataaaccaagggcgagggaccaaagagaaagaagtgacagagtatggaaaagggagaaagatagggagaaatattcccaaagagaacaagaaagagatagacaacaaaatgatcagaaccgacccagtgagaaaggagagaaggaagagaaaagcaaagcaaaggaagagcatatgaaagtaaggaaggaaagatatgaaaataatgataaatacagagatagagaaaaacgagaggtaggtgttcagtcttcagaaagaaatcaagacagaaaggaaagcagcccaaattctagggcaaaggataaatttcttgaccaagaaagatccaacaaaatgagaaacatggcaaaggacaaagaaagaaaccaagagaaaccctctaattctgaatcatcactgggagcaaaacacagactcacagaggaagggcaagagaagggtaaagaacaagagagaccacctgaggcagtgagcaagtttgcaaagcggaacaatgaagaaactgtaatgtcagctagagacaggtacttggccaggcagatggcgcgggttaatgcaaagacctatattgagaaagaagatgattgatggctaccccaagagaaagatttaaggaagcacagaaaactgtaattcctggaacctgctgcgtaaaaccataaaggagtgtgttaccagtagtttggagggcatttttaaatttattttcaaaattttaagttaaaagtcagtcttacagcttggatgtttggatgtggatgtttggctgaatttatatatagtgtgtactcatcaataccacattctttgttgtattcaagaaccgttaagagtgtgctaattccctgtaggtacataatgaggaaaatttgctccactacaaccattaaaaaataattttggccagatacggtagctcgtgcctgtaataccaacattttgggaggccaaggcagaaggatattgaggctaggcattcaagaccagcctaggcaggataataagaccttgtctctatttaaaaaacaaaaagcctagcatggtagtccatgcctgtagtcccagctgttcgagaggctgaggcaagaagatcacttgagcctaggaatttgatgttacagtgaggtatgatcatgccactgcactccaacctgggcaacagaatgagaccctgtctctaaaaaattttttttaaataaataatttaactcttctaataatgttttgttgcaggaaatgtatttcagataaaatatggatttgaaaaacagaaaatatactttatgttctgaaatttgtatttaagtataaaatgtgaatcatcttgtctaaatagcttacagcatagttggcttaaatgaaaataaaatgatatgcttataaaaaaaaaaaaaaaaaaaaaaaaaaaaaaaaaaaaaaaaaaaa

SEQ ID NO: 478 - protein, 558 aa, Homo sapiens
MAIPGRQYGLILPKKTQQLHPVLQKPSVFGNDSDDDDETSVSESLQREAAKKQAMKQTKLEIQKALAEDATVYEYDSIYDEMQKKKEENNPKLLLGKDRKPKYIHNLLKAVEIRKKEQEKRMEKKIQREREMEKGEFDDKEAFVTSAYKKKLQERAEEEEREKRAAALEACLDVTKQKDLSGFYRHLLNQAVGEEEVPKCSFREARSGIKEEKSRGFSNEVSSKNRIPQEKCILQTDVKVEENPDADSDFDAKSSADDEIEETRVNCRREKVIETPENDFKHHRSQNHSRSPSEERGHSTRHHTKGSRTSRGHEKREDQHQQKQSRDQENHYTDRDYRKERDSHRHREASHRDSHWKRHEQEDKPRARDQRERSDRVWKREKDREKYSQREQERDRQQNDQNRPSEKGEKEEKSKAKEEHMKVRKERYENNDKYRDREKREVGVQSSERNQDRKESSPNSRAKDKFLDQERSNKMRNMAKDKERNQEKPSNSESSLGAKHRLTEEGQEKGKEQERPPEAVSKFAKRNNEETVMSARDRYLARQMARVNAKTYIEKEDD

SEQ ID NO: 479 - DNA, 725 bp, Homo sapiens
  CDS (12)..(584)
cttcgcagagcatggcggcgggcgagcttgagggtggcaaacccctgagcgggctgctgaatgcgctggcccaggacactttccacgggtaccccggcatcacagaggagctgctacggagccagctatatccagaggtgccacccgaggagttccgcccctttctggcaaagatgagggggattcttaagtctattgcgtctgcagacatggatttcaaccagctggaggcattcttgactgctcaaaccaaaaagcaaggtgggatcacatctgaccaagctgctgtcatttccaaattctggaagagccacaagacaaaaatccgtgagagcctcatgaaccagagccgctggaatagcgggcttcggggcctgagctggagagttgatggcaagtctcagtcaaggcactcagctcaaatacacacacctgttgccattatagagctggaattaggcaaatatggacaggaatctgaatttctgtgtttggaatttgatgaggtcaaagtcaaccaaattctgaagacgctgtcagaggtagaagaaagtatcagcacactgatcagccagcctaactgaagatgatgtatgaaggagttggagttgttgaaaccaaggtgtccatgatccctccccactgaccttttctaagaaaattcttgtgcccgcattggtattaaatcctcgcattcagtcttcctgcctctaaaaaaaaaaaaa

SEQ ID NO: 480 - protein, 190 aa, Homo sapiens
MAAGELEGGKPLSGLLNALAQDTFHGYPGITEELLRSQLYPEVPPEEFRPFLAKMRGILKSIASADMDFNQLEAFLTAQTKKQGGITSDQAAVISKFWKSHKTKIRESLMNQSRWNSGLRGLSWRVDGKSQSRHSAQIHTPVAIIELELGKYGQESEFLCLEFDEVKVNQILKTLSEVEESISTLISQPN

SEQ ID NO: 481 - DNA, 1955 bp, Homo sapiens
  CDS (430)..(1167)
agaggggcgggacttctccgggtcaaggccaggtctcttccctgctcggtgctatgttcctgttccacggggtggcgggtcctggaagggagaagcccagacccagtggacactgacattgtctctcgctgttcccagccttttccaggcgtgtgacttaatccgtttccacagccagaccttttctccgtgagttcctcagccaggactgctgccatgccggtgactgttacccacccaaccgtcacgaccaccatgcggtcccccaccgtcgtagggtcctctagggccctgatccagcccctgggcctcctccgcctgctgcagctggtgtccacctgcgtggccttgtcactggtggccagcgtgggcgcctggaaggggcctatgggtaactggtccatgttcacctagtgtttctgctttgccatgaccctggtcatcctcctcgtggagctgggcggctcccaggcccgcttccccttgttttggcgcaacttccccatcacctttgcctgctatgcggccctcttgtgcctctcggcctccatcatctaccccaccacctacttgcagttcctgtcccacggccgttcccgcgaccacgccatcgccgccatcgtcttctctggcatcgcctgtgtggcttatgccaccgaagtaacctggactcgggcccggcccggcgagatcactgactacatggcctccgagctggggctgctgaaggtgctggagaccttcgtggcctgcctcatcttcgtgttcatcaatagcccctacgtgtaccacaaccggccggccctggagtggtgcgtggcggtgtacgccctctgcttcgtcctggcggccctcactgtcctgctgagcctggggcactgcaccaacatgctgcccatccgcttccccagtttcctgttggggctggccttgctgtccgtcctcctctatgccactgcccttgtcctctggcccctctaccagttcaacgagaagtatggtgtccagccctggcagacgagagatgtgagctgcagcgacagaaacccctaccttgtgtgtatctgggaccgccgactggctgtgaccaacctgacggccgtcaacttgctggcctatgtgggcgacctggtgtactctgcccacctggtttttgtcaaggtctaagactcccaaagggccccgtttgcctctccaacctcttcatcctgccccccctgagttttctttattgagtattcatttcctgtgttttcctcttccctatctcccctcctccccttttctttccttcccaattcatcgcactttcccagttctctgatgtatgttcttccctttcctctgctgtttccttcttgttttgttctgttgcccacaacctgttttcacccgtttctctttttccactctctcttttgtttctttcctctcaattcttttctaggtttcctgttggttttcttatctgcctatttcccgaccatcttctcctatttcctggggagccctgaggcttttcttctcctgcccccacgcacctccagcggtgatgagctccacacccccacacccattgcagctgtggcgccacgtcctcccaaggggccttctgcccgcccccgccctagccctagctgtgccttagtcagtgtgtacttgtgtgtgtttgggggagtgggaattgggccccctttctcccagtggaggaaggtgtgctgtgcacctcccctttaaattaaaaaaaatgtatgtatctctggaggtcaataatttccagtgagcgggaggcttcaagcgcagaccctgggtccctagacctcgcctagcactctgccttgccagagattggctccagaatttgtgccagacttacagaaaacccactgcctagaggccatcttaaaggaagcaatggatggatccctttcatcccaactgttcttcgcggtatc

SEQ ID NO: 482 - protein, 245 aa, Homo sapiens
MTLVILLVELGGSQARFPLFWRNFPITFACYAALLCLSASIIYPTTYLQFLSHGRSRDHAIAAIVFSGIACVAYATEVTWTRARPGEITDYMASELGLLKVLETFVACLIFVFINSPYVYHNRPALEWCVAVYALCFVLAALTVLLSLGHCTNMLPIRFPSFLLGLALLSVLLYATALVLWPLYQFNEKYGVQPWQTRDVSCSDRNPYLVCIWDRRLAVTNLTAVNLLAYVGDLVYSAHLVFVKV

SEQ ID NO: 483 - DNA, 5508 bp, Homo sapiens
  CDS (447)..(3155)
agtggcagaagagggctaggctgagagggaagccaggactgtaggagagggaggcagcccgtcctcctcacgaacctgcaaggatgcggcaggggcctgggggcatggggaggtactaaccccccggagcccccgattggggcttgcagacctggcccgtgggcggattttctgcctagcgcagccgagaagcagaggtgccaggaaaaccaagagaggggcgctgggggtgcccatccccagagtcggtccctctgcgaaccgaggaagaaaagaggagggagtcagcgagtggtcagaagggaaaacctgacaccagactggctccggagcgtccgggagactggggcgctccgcgccatcgtcttcaatgcttctctgaacagcctttaggaagagtgcgagagaaagagagagagcgcgcgccagggagaggagaaaagaagatgaggattatttccagacagattgtcttgttattttctggattttggggactcgccatgggagcctttccgagcagcgtgcaaataggtggtctcttcatccgaaacacagatcaggaatacactgcttttcgattagcaatttttcttcataacaccagccccaatgcgtcggaagctccttttaatttggtacctcatgtggacaacattgagacagccaacagttttgctgtaacaaacgccttctgttcccagtattctagaggagtatttgccatttttggactctatgataagaggtcggtacataccttgacctcattctgcagcgccttacatatctccctcatcacaccaagtttccctactgagggggagagccagtttgtgctgcaactaagaccttcgttacgaggagcactcttgagtttgctggatcactacgaatggaactgttttgtcttcctgtatgacacagacaggggatactcgatactccaagctattatggaaaaagcaggacaaaatggttggcatgtcagcgctatatgtgtggaaaattttaatgatgtcagctataggcaacttctagaagaacttgacagaagacaagagaagaagtttgtaatagactgtgagatagagagacttcaaaacatattagaacagattgtaagtgttggaaagcatgttaaaggctaccattatatcattgcaaacttgggattcaaggatatttctcttgagaggtttatacatggtggagccaatgttactggattccagttggtggattttaatacacctatggtaatcaaactaatggatcgctggaagaaactagatcagagagagtatccaggatctgagactcctccaaagtacacctctgctctgacttatgatggagtccttgtgatggctgaaactttccgaagtcttaggaggcagaaaattgatatctcaaggagaggaaatgctggggattgtctggcaaatcctgctgctccatggggccagggaattgacatggagaggacactcaaacaggttcgaattcaagggctgacagggaatgttcagtttgaccactatggacgtagagtcaattacacaatggatgtgtttgagctgaaaagcacaggacctagaaaggttggttactggaatgatatggataagttagtcttgattcaagatgtaccaactcttggcaatgacacagctgctattgagaacagaacagtggttgtaaccacaattatggaatccccatatgttatgtacaagaaaaatcatgaaatgtttgaaggaaatgacaagtatgaaggatactgtgtagatttggcatctgaaattgcaaaacatattggtatcaagtataaaattgccattgtccctgatggaaaatatggagcaagggatgcagacacaaaaatctggaatgggatggtaggagaacttgtttatgggaaagcagagattgctattgcccctctgacaatcactttggtacgagaggaggtcattgacttttctaagcccttcatgagtttgggcatatctatcatgatcaaaaagcctcagaaatccaaaccaggagtgttttccttcttggatcctctggcctatgagatttggatgtgcatagtctttgcctacattggtgtcagcgtggtcttattcctagttagtagatttagtccatatgagtggcacacagaagagccagaggacggaaaggaaggacccagcgaccagcctcccaatgagtttggcatctttaacagcctctggttttccctgggtgcttttatgcagcaaggatgtgacatttcacccagatccctctcaggtcgaattgttggaggtgtttggtggttctttacactcatcattatatcatcttatactgctaacctcgctgctttcctgacggttgagcgaatggtctctcccatagaaagtgcagaagacctggccaaacaaacagaaattgcctatggaacactggattcaggatcaacaaaagaattcttcagaagatcaaaaatagcagtgtatgaaaagatgtggacctacatgcgatcagcagagccatcagtattcactaggactacagctgagggagtagctcgtgtccgcaaatccaagggcaaatttgcctttctcctggagtccactatgaatgaatacattgagcagcgaaagccatgtgacacgatgaaagtgggaggaaatctggattccaaaggctatggagtagcaacgcccaagggttcctcattaggaactcctgtaaaccttgccgttttgaaactcagtgaggcaggcgtcttagacaagctgaaaaacaaatggtggtacgataaaggtgaatgtggacccaaggactctggaagcaaggacaagacgagtgccttgagcctgagcaatgtagcaggcgtcttctacattctggttggcggcttgggcttggcaatgctggtggctttgatagagttctgttacaagtccagggcagaagcgaagagaatgaagctgaccttttctgaagccataagaaacaaagccagattatccatcactgggagtgtgggagagaatggccgcgtcttgacgcctgactgcccaaaggctgtacacactggaactgcaatcagacaaagttcaggattggctgtcattgcatcggacctaccataaaaaccaaaaaaataattgagtgccttaattaaactgttggtgactggtggaaacgcagccctgagggacacgccacgcgcgggtctttgctaaaccaatcctttggctgagagcgggaagtccgtcctaacgcgctggccggacatcagcagcagcaacgtgtgcatgagctcagctcggaaacccaaactcagattttatatcaggaaaactcacaattgaggtttttttcggggagtgggtgggggagggatctgggatgggtgtattaacagcaacaaatttcattcgagtggactcaaaaactaatcagacttatgagttagcgcattaaactgtgaagttcttgctcagaaaggcctttgtcttcaccggaaaggataaaatagttgtagaagtccgtgaacatgctaacctgtgtctccagaacatccatatagtccatggaagaaaatccagctgagaaaacaaatcactaaactgtgataagaaaataatgaacaaacatgtaaaacctgtgggaaaaaaaaataaaggaagtatgtacacttactttggagaaaacaaatactgaaacatgcttgctttttaactgacgtaaattcagtagaggacaacacaattcttttttctaaccatcttagggaacaatacattgcaataattgatataaatgccatcactgtaataaactttagagacttttttttataaaagttgttggtcatcttcttgtttgctgtaaccttcactatgtcacatgagtcgattcaccgattgcatttgtctcacaaccaggaagaaaagcaaaaggaagaaaacgtttaggttcaatcatcagtctgcggtgtagactcgaaagagatgacaggtcactcatgttaatggtattatttataatctcattctgtgtacaacattgtggtttttgtacccaccaaaaagaataaaacagcagatgttcttacaatatctacagagcttaaaagttttttcttatcgttataaaagttatttgagaaattataagactataagagagattgtattagtggtgggccatagtggaaaatgtagctagccctcattattttttgcatactaagctacccctccttttcagatctttgactcattaacagattaaactgtcaaagatggagtctttgagttggggaatgaatcactgtcctaacaacaacataccttgtaattgtgtgttgaaattttacttgactgtattttgctgcataaaattatgtgtctcttgggcttcttcccttattcctattgttccctttaaatcatatgaaggcattcataatagcttggggtagataacaaatgaagaattagtctttgttttcaactggaaattgtaaagaaaattatactcatgtttatttataaaaatcaccttatgtatgaattaaactaacatggttcaaaagaaggtttggttcatttgaaataataaataagtactctaatacagataaaaatcatgtacttagggtattggcagaaagcacaagttaggatgatttcagaagtctggccttgaaggatgagttgagttttaacaggaggagaaggtgttaagagccatatgagtgagcagtggcccaaagccatgcacatcagtggctcatttaaggaatgaatgccattagatgggctactgagagtacagggatattatggaagataaagttggaaaagctgaaggattgattttcttccatcaactctcaagatcccattcgccattcaatctctgtgctgcagtaagagcaatcttaaacagtataaatcacacacacacacacacacacacacacacacacacacaagtccctcaggaaaaattccaagctcttgagaagatcacatgagccccttcatgacctggcgcttgcttatttcttccaggacttctctcacttctatccagctattcccgtcagcaaatgaacctccaaagcagcacatggagcactgcatagactatttcctcagtgcgtaactcctccctgtctcctctttacctgagtaacttgtactcatccttcaatactccaactgaattttacttaccctgaaaagatttccatggctatccaccacccccctgcctgtgagactgagttaggtgccctttttcatgtctttcccccatcacggcacttaccatactgcgttgtaattgcctgtgtactcgtctgtataactactagactgtaagctccttgagggcagggactgtgtctatcttgttcacagttgtatccccagcacccagcacagtgcctggcatattgtaggtgcttaataaatatttgttgaatgaatg

SEQ ID NO: 484 - protein, 902 aa, Homo sapiens
MRIISRQIVLLFSGFWGLAMGAFPSSVQIGGLFIRNTDQEYTAFRLAIFLHNTSPNASEAPFNLVPHVDNIETANSFAVTNAFCSQYSRGVFAIFGLYDKRSVHTLTSFCSALHISLITPSFPTEGESQFVLQLRPSLRGALLSLLDHYEWNCFVFLYDTDRGYSILQAIMEKAGQNGWHVSAICVENFNDVSYRQLLEELDRRQEKKFVIDCEIERLQNILEQIVSVGKHVKGYHYIIANLGFKDISLERFIHGGANVTGFQLVDFNTPMVIKLMDRWKKLDQREYPGSETPPKYTSALTYDGVLVMAETFRSLRRQKIDISRRGNAGDCLANPAAPWGQGIDMERTLKQVRIQGLTGNVQFDHYGRRVNYTMDVFELKSTGPRKVGYWNDMDKLVLIQDVPTLGNDTAAIENRTVVVTTIMESPYVMYKKNHEMFEGNDKYEGYCVDLASEIAKHIGIKYKIAIVPDGKYGARDADTKIWNGMVGELVYGKAEIAIAPLTITLVREEVIDFSKPFMSLGISIMIKKPQKSKPGVFSFLDPLAYEIWMCIVFAYIGVSVVLFLVSRFSPYEWHTEEPEDGKEGPSDQPPNEFGIFNSLWFSLGAFMQQGCDISPRSLSGRIVGGVWWFFTLIIISSYTANLAAFLTVERMVSPIESAEDLAKQTEIAYGTLDSGSTKEFFRRSKIAVYEKMWTYMRSAEPSVFTRTTAEGVARVRKSKGKFAFLLESTMNEYIEQRKPCDTMKVGGNLDSKGYGVATPKGSSLGTPVNLAVLKLSEAGVLDKLKNKWWYDKGECGPKDSGSKDKTSALSLSNVAGVFYILVGGLGLAMLVALIEFCYKSRAEAKRMKLTFSEAIRNKARLSITGSVGENGRVLTPDCPKAVHTGTAIRQSSGLAVIASDLP

SEQ ID NO: 485 - DNA, 6377 bp, Homo sapiens
  CDS (246)..(1997)
tccgcctcacattatctgcccaagcacagtgctgttggccaagcctccagcagctgacgggacccagctgtagtgaggttgcagtgattgagtaggattggcctgcttcaaagcagaggtttctcatgggaatatgcttattaaactcccactggtgcagaaaccatgaacagaggatgaacaagtgaagttgcaatctcctccatcacagctcagttccccaacaacaggatcacaagctggagatgcctttaaggaagatgaagatccctttcctcctactgttctttctgtgggaagccgagagccacgcagcatcaaggccgaacatcatcctggtgatggctgacgacctcggcattggagatcctgggtgctatgggaacaaaactatcaggactcccaatatcgaccggttggccagtgggggagtgaaactcactcagcacctggcagcatcaccgctgtgcacaccaagcagggcagccttcatgactggccggtaccctgtccgatcaggaatggcatcttggtcccgcactggagttttcctcttcacagcctcttcgggaggacttcccaccgatgagattacctttgctaagcttctgaaggatcaaggttattcaacagcactgatagggaaatggcaccttgggatgagctgtcacagcaagactgacttctgtcaccaccctttacatcacggcttcaattatttctatgggatctctttgaccaatctgagagactgcaagcccggagagggcagtgtcttcaccacgggcttcaagaggctggtcttcctccccctgcagatcgtcggggtcaccctccttacccttgctgcactcaattgtctggggctactccacgtgcctctaggcgtttttttcagccttctcttcctagcagccctaatcctgacccttttcttgggcttccttcattacttccggcccctgaactgcttcatgatgaggaactacgagatcattcagcagcccatgtcctatgacaatctcacccagaggctaacggtggaggcggcccagttcatacagcggaacactgagactccgttcctgcttgtcttgtcctacctccacgtgcacacagccctgttctccagcaaagactttgctggcaaaagtcaacacggagtctacggggatgctgttgaggaaatggactggagtgtggggcagatcttgaaccttctggatgagctgagattggctaatgataccctcatctacttcacatcggaccagggagcacatgtagaagaagtgtcttccaaaggagaaattcatggcggaagtaatgggatctataaaggaggaaaagcaaacaactgggaaggaggtatccgggttccaggcatccttcgttggcccagggtgatacaggctggccagaagattgatgagcccactagcaacatggacatatttcctacagtagccaagctggctggagctcccttgcctgaggacaggatcattgatggacgtgatctgatgcccctgcttgaaggaaaaagccaacgctccgatcatgagtttctcttccattactgcaacgcctacttaaatgctgtgcgctggcaccctcagaacagcacatccatctggaaggcctttttcttcacccccaacttcaaccccgtgggttccaacggatgctttgccacacacgtgtgcttctgtttcgggagttatgtcacccatcacgacccacctttactctttgatatttccaaagatcccagagagagaaacccactaactccagcatccgagccccggttttatgaaatcctcaaagtcatgcaggaagctgcggacagacacacccagaccctgccagaggtgcccgatcagttttcatggaacaactttctttggaagccctggcttcagctgtgctgtccttccaccggcctgtcttgccagtgtgatagagaaaaacaggataagagactgagccgctagcagcgcctggggaccagacagacgcatgtggcaaagctcaccatcttcactacaaacacgcctgagagtggcactggggaaacataactccatctacaccttggatttggactgattctccattttatcacctgaaggcttgggccagagctcaacagctactcaactggaggggtgagggggataaggtctgtagtatacagacaggaagatggtaggtttatgccttctgtggccagagtcttggactcatggaaatagaatgaatagaggggcattcacaaggcacaccagtgcaagcagatgacaaaaaggtgcagaaggcaatcttaaaacagaaaggtgcaggaggtaccttaactcacccctcagcaaatacctatgtcaacagtataagttaccatttactctataatctgcagtgatgcaataaccagcataataaaaaggcaatcacataaaaaagagtttagtcgtctaaacataagtaactttaaggtgaatgaaagatcttctttaggaataatagatgatggtaagttccactttggttattggaaggcaagtcattattactggtattagttaaaacacatatcaaatgcttgctcttcatcatatatatagttatgcatacatacacacacacacatacagtatattctttcctcaaaagggttaagatgtctaaaatagggacctagaagcttaacactatttaagtaaatacagtagaagctcacaaatagatttctttgcacaatgattttttgcaaaattttacagtaataataatcccaaggcaaatctctcctgaactgctttccattccataatttgtagtataattcttggattccactgttttctttggggaatggaagttctgaattaaaagcccactgtggagatgctgtggttcatggaatctcttccagtgtaattcagaatcattggcctagaaagtctctgatatttggaggggaacaaaaatcactcacaagcaatccatgatctatacacataagcataatttcctttagttctagttagtcatcagagaacagtcatgtatgcaagttttgtgactgagaaatttctgtgcttccaatccacaatgagatgcatgattttgttttcatcccatttcccccaagcccctgtaaatcagggaaaatgcgcaactgatcgcctaggagagggcctcgtagtggcacagctggagatagtttcaaagtctaaaccaccagcccatcctgaggaaagcctcctatggaatgtaaagtgcaatcatttcttcagatataagactttccccaacaatgtgattggattcctttatggcaaaatcgagagaagctgccatccacctgcttatgcatttatctcttttgtggacttgtctgaccaccttctatttgcccagagtttgctcaattccaagacagtgcccatgaatgggacacctgtaatgtaacccacacagcggtttgcagagaatgttagccatgacttgggctttctgaaagttggctataatttctctatccctacccacaaccctgggaagttggagcaagaggggcatactattgggctgggaggatttgacagcatttccccagttgccctttaagttcttctatttcaaacgttaattttgcttctctttctaaaaaaaaaaaaaaaaaagaaagagaagaaagaagtgattcctaccccctacctccagagttgttgaaagctgaaaagcatacaagattcttccttttaacttggatttctcgttccagaaattgtgggataatctgtattcttgctttagaaaacattcttagagagggtactagcttactgatgatgtgttaggattgctactgatgctgtcatgtggaaactatttaaaggcactattataaatttatcctataagatgacaatgtttactcaaagtctaacatattcaatgcaagtaagactttctgaaaacacttgatgatgtggaaatgctgcaggattaaataacttgaagagcctttatagattatatgaatgcctatttgtgtctagaaccagttatttaacctgtaaaatgtcaatagcaaatgaaggatgaagtatatctctagatgcaaatacattgagtttaaaagtgcctcaaaataattgagatcacatttcaggacatttggaaatcaggtcgatttgtggtaactgtagtcatcttaaatttcaaaccatttaccatctgaaagttttgatttgaatgtaaaacaggaaattggaattcctttgtccaggagaaacctcacaaaccttctttaaggcatagttttgttgtttgtttgcttgtttgttgcaggctgtaaggcatggctgcttgtttacaaagcatctcattcatattacctgtggagttgcatatccaaaccttagtgagttttgaagctttaagcaaattcttttaaaaaattcttgtatttctagcattactagatattaaaagttaagcaaatagattaatgacgtatacataggcatcatttcacaaggtcagtaatgctgcaggaaaagcaaaattgcaatctacgtatctatggtactaaggaagtcctgtttttcaaaaatggaagcccacttctcagatttttctgaagggcatacaatgaaaagtgaaggggaaacacacacacacaaaaaaacaagtatttggcttgtcacaggaatctgattgcattaagtgaaaggattatttagaatatgttaatgcaaagctaaaataaaattttccttggcaattaaaaatgctgtgcgctaataccctgctttctatcgtgactcaattcaacaatgtggggaatgtttactacatttccaacttgatgtcaagcaatggggaatacaagttccagttctgcaaagattcgtcaactttcttagctcaagagagaggctgagaaatgcagagaagaataagacataaaatagctccgacctccatgatccgagagtgggaaaaggcccgattattacccataaggcacactctctaaggccttttaaggggcctacaaaaatgttttattttataatcagaagaaaaggaaatgaacattggggattgaaaatcatattggtatttgcaccaacatagtcataaaatagtatgttaatatgtttttactttatatatttatatattaaaatatatttaatatgttttgcctttgtggcccatgaaagtcttactgggccctggggaaggtatcctaccctggtgaagcagctgctttgctctacaaatacctggggcagaaatttgatttgaaaagtattattctctcttctctttgtttcaactggattcctttggaaaaccaaactagtatcagaacaaaccccgaaacagtaagaaattggagtgagaagggcatggtattgggactaggatcggctctcattcgatcgagctattctcttaaaatgacaaaaagtgtccataaagaggctgctggagagtgcgtggccatagggagccgacatgcccgggaggaaaggtgttgattacatggatacttctaaaagctaaagccttgttgccttctctttaatgcctagagaatgggatgtgtgatgcaaatgctcaaaacctcttaaatcatagctgtctgacctctacggacctcacatccatctgaggcttcatggacaaagattctccacttggccaaactttagccaagctcctcaaccttctcccaggcccaatctgggcacttccttgtaaaatctagttttggcaagaagtctattaggtcagtttagcaagaacacctaacccccccatatctgttcaacctcagtatctgatcaggctcctcagcctccaccatcccccaggtgatgtctggtcaactggcctgccttcagctagaatcctgttaggtcggtttagatgaatgctccctgatatttcctcttggtaatcttccatccactgcccctgaccctgttccctgtctataaatccccagttttccatggtgtattcagagctgagtccagtctctctcccctactacaagtccccattgctgtggtccccgtacctgtcatgatggtcctaaataaagtcttactgtgctttaataggtagcattgaaaaatttttttctttgacatcattcatgacaacatgaaacctattgggacagcatgactgtgcagggtctttagagctcagctttctgaggccctgagcattcttggttttccgacatcgtgaacctgttctgtgttgcaagatatcactcaagccagtgttgcttaataccatctctttgtgtaatagatctgaataaagtaattgtaatacaccaa

SEQ ID NO: 486 - protein, 583 aa, Homo sapiens
MPLRKMKIPFLLLFFLWEAESHAASRPNIILVMADDLGIGDPGCYGNKTIRTPNIDRLASGGVKLTQHLAASPLCTPSRAAFMTGRYPVRSGMASWSRTGVFLFTASSGGLPTDEITFAKLLKDQGYSTALIGKWHLGMSCHSKTDFCHHPLHHGFNYFYGISLTNLRDCKPGEGSVFTTGFKRLVFLPLQIVGVTLLTLAALNCLGLLHVPLGVFFSLLFLAALILTLFLGFLHYFRPLNCFMMRNYEIIQQPMSYDNLTQRLTVEAAQFIQRNTETPFLLVLSYLHVHTALFSSKDFAGKSQHGVYGDAVEEMDWSVGQILNLLDELRLANDTLIYFTSDQGAHVEEVSSKGEIHGGSNGIYKGGKANNWEGGIRVPGILRWPRVIQAGQKIDEPTSNMDIFPTVAKLAGAPLPEDRIIDGRDLMPLLEGKSQRSDHEFLFHYCNAYLNAVRWHPQNSTSIWKAFFFTPNFNPVGSNGCFATHVCFCFGSYVTHHDPPLLFDISKDPRERNPLTPASEPRFYEILKVMQEAADRHTQTLPEVPDQFSWNNFLWKPWLQLCCPSTGLSCQCDREKQDKRLSR

SEQ ID NO: 487 - DNA, 2629 bp, Homo sapiens
  CDS (393)..(1424)
accgccccgcgctccgctgccaggggcgggagggaggaatggttgcttcacgccccgggggaagagacgggaagctcggctctgggttgcgggccccggcgtctccgcgtggggcgcaccgtccgacccccccctcccggtgtgcagcgccccgcaccgccccgcctcgcctgggagaagccgccgggacgcgccgggctggagtgggcggttataggctttgagctaggccgtttccgggaggcggagctcagaccccatttcctttctccacatccaggtcaggtggcgtttgctgtggcggctaggcccgcgtgcgctggagacctccgcgctggcccccgcgagcctcctgccctggcccggcgctgcggctctgccgcggcggcagcatgggtggcccccggggcgcgggctgggtggcggcgggcctgctgctcggcgcgggcgcctgctactgcatttacaggctgacccggggtcggcggcggggcgaccgcgagctcgggatacgctcttcgaagtccgcaggtgccctggaagaagggacgtcagagggtcagttgtgcgggcgctcggcccggcctcagacgggaggtacctgggagtcacagtggtccaagacctcgcagcctgaagacttaactgatggttcatatgatgatgttctaaatgctgaacaacttcagaaactcctttacctgctggagtcaacggaggatcctgtaattattgaaagagctttgattactttgggtaacaatgcagccttttcagttaaccaagctattattcgtgaattgggtggtattccaattgttgcaaacaaaatcaaccattccaaccagagtattaaagagaaagctttaaatgcactaaataacctgagtgtgaatgttgaaaatcaaatcaagataaagatatacatcagtcaagtatgtgaggatgtcttctctggtcctctgaactctgctgtgcagctggctggactgacattgttgacaaacatgactgttaccaatgaccaccagcacatgcttcacagttacattacagacctgttccaggtgttacttactggaaatggaaacacgaaggtgcaagttttgaaactgcttttgaatttgtctgaaaatccagccatgacagaaggacttctccgtgcccaagtggattcatcattcctttccctttatgacagccacgtagcaaaggagattcttcttcgagtacttacgctatttcagaatataaagaactgcctcaaaatagaaggccatttagctgtgcagcctactttcactgaaggttcattgtttttcctgttacatggagaagaatgtgcccagaaaataagagctttagttgatcaccatgatgcagaggtgaaggaaaaggttgtaacaataatacccaaaatctgattggtcatatttttccaaagagtaatgcagtctggatataaatgtattttctgtcttccttataaggggattctcccagctgctaaatttaaacagtaaatatcacattttgtcattaacacagctataacttgccgtggttctcagatttattttggactattttgatgccaagtgaatataagagtttgtactgaaaccatttatttctttctattttgctatttgcaaatgcttgttatcttccctacatgaagtggcagtaacctttttcacatttaagctacccttctaccttttgaagtgatttgcagttactcatctgagacagcatcagtatttgactaaatcattgtttcacaactgaatagtcttgttcttttagtagcaatgaaatcctaagctcttgaggccattcacctgccaacctgaccatactgctttcaaaagtcttttctcatcagtagaatctattttggtcacttctagtcaatgaaaaatgtaaacttttaggagagaatgtttcctaggactcacccactccattcaatgttacatataaaatagtgtgatcaatcacaatgtccatctttagacagttggttaaataaattatctggtctttgaaaagaccgtgctgggcgcggtggctcttgcctgtaatcccagcactttgggaggctgaggcgggcagatcacctgagatcgggagtttgagaccaagcctgaccaatatggagaaaccctgtctctactaagaatacaaaattagctgggcatggtggtgcatgcctgtaatcccagctacttgggaggccgaggcaggagaattgcttgaacccgggaggcagaggttgcagtgaggtgagatagcgccattgcactccagcctgggcaacaagagcaaaactctgtctcaaaaaaaaaaaaaaatgatggagctccgaatgtgcttaagtggaaagatatctatgaaatatggtggttttttaaaacacaaaaattatagaatatgggatcccgtgtgtgtgtgtgtgtgtttgaatgaaaaatgcttatgtattgacagaacacttctagaatgatacccaaactcctggagtgggagtggggaatgccttctacgtacacactgttctactgtttgaattttttaatatgagcccaaattgtataatctttttttaataaaggggagaaaaatc

SEQ ID NO: 488 - protein, 343 aa, Homo sapiens
MGGPRGAGWVAAGLLLGAGACYCIYRLTRGRRRGDRELGIRSSKSAGALEEGTSEGQLCGRSARPQTGGTWESQWSKTSQPEDLTDGSYDDVLNAEQLQKLLYLLESTEDPVIIERALITLGNNAAFSVNQAIIRELGGIPIVANKINHSNQSIKEKALNALNNLSVNVENQIKIKIYISQVCEDVFSGPLNSAVQLAGLTLLTNMTVTNDHQHMLHSYITDLFQVLLTGNGNTKVQVLKLLLNLSENPAMTEGLLRAQVDSSFLSLYDSHVAKEILLRVLTLFQNIKNCLKIEGHLAVQPTFTEGSLFFLLHGEECAQKIRALVDHHDAEVKEKVVTIIPKI

SEQ ID NO: 489 - DNA, 1595 bp, Homo sapiens
  CDS (99)..(1052)
gagtgagtgagagggcagaggaaatactcaatctgtgccactcactgccttgagcctgcttcctcactccaggactgccagaggaagcaatcaccaaaatgaagactgctttaattttgctcagcattttgggaatggcctgtgctttctcaatgaaaaatttgcatcgaagagtcaaaatagaggattctgaagaaaatggggtctttaagtacaggccacgatattatctttacaagcatgcctacttttatcctcatttaaaacgatttccagttcagggcagtagtgactcatccgaagaaaatggagatgacagttcagaagaggaggaggaagaagaggagacttcaaatgaaggagaaaacaatgaagaatcgaatgaagatgaagactctgaggctgagaataccacactttctgctacaacactgggctatggagaggacgccacgcctggcacagggtatacagggttagctgcaatccagcttcccaagaaggctggggatataacaaataaagctacaaaagagaaggaaagtgatgaagaagaagaggaggaagaggaaggaaatgaaaacgaagaaagcgaagcagaagtggatgaaaacgaacaaggcataaacggcaccagtaccaacagcacagaggcagaaaacggcaacggcagcagcggaggagacaatggagaagaaggggaagaagaaagtgtcactggagccaatgcagaagacaccacagagaccggaaggcagggcaagggcacctcgaagacaacaacctctccaaatggtgggtttgaacctacaaccccaccacaagtctatagaaccacttccccaccttttgggaaaaccaccaccgttgaatacgagggggagtacgaatacacgggcgccaatgaatacgacaatggatatgaaatctatgaaagtgagaacggggaacctcgtggggacaattaccgagcctatgaagatgagtacagctactttaaaggacaaggctacgatggctatgatggtcagaattactaccaccaccagtgaagctccagcctgggatgaattcatccattctggctttgcatccggctaccattttcgaagttcaactcaggaaggtgcaatataacaaatgtgcatattataatgaggaatggtactaccgttccagattttctgtaattgcttctgcaaagtaataggcttcttgtcccttttttttctggcatgttatggaatgatcattgtaaatcaggaccatttatcaagcagtacaccaactcataagatcaaatttcattgaatggtttgaggttgtagctctataaatagtagtttttaacatgcctgtagtattgctaactgcaaaaacatactctttgtacaagaagtgcttctaagaatttcattgacattaatgacactgtatacaataaatgtgtagtttcttaatcgcactacctatgcaacactgtgtattaggtttatcatcctcatgtatttttatgtgacctgtatgtatattctaatctacgagttttatcacaaataaaaatgcaatccttcaaatgtgttataattaaaaaa

SEQ ID NO: 490 - protein, 317 aa, Homo sapiens
MKTALILLSILGMACAFSMKNLHRRVKIEDSEENGVFKYRPRYYLYKHAYFYPHLKRFPVQGSSDSSEENGDDSSEEEEEEEETSNEGENNEESNEDEDSEAENTTLSATTLGYGEDATPGTGYTGLAAIQLPKKAGDITNKATKEKESDEEEEEEEEGNENEESEAEVDENEQGINGTSTNSTEAENGNGSSGGDNGEEGEEESVTGANAEDTTETGRQGKGTSKTTTSPNGGFEPTTPPQVYRTTSPPFGKTTTVEYEGEYEYTGANEYDNGYEIYESENGEPRGDNYRAYEDEYSYFKGQGYDGYDGQNYYHHQ

SEQ ID NO: 491 - DNA, 2345 bp, Homo sapiens
  CDS (209)..(685)
aaagcaggcggggcgttggagttcagatgttcgctcccgggataggctgccccggagagggagaggcggggtcggctgtatcacgtggatctgctcccgccgccgccgccgccgccgtcgtctttctctgtctcggctgaggcagccatctttctcttgccgcgtgctggtgttggaggaccctccctgcttcagatttaccaacagcatgaatcaagaaaagttagccaaacttcaggctcaggtccggatagggggcaagggtacagctcgcagaaagaagaaggtggtacatagaacagccacagctgatgacaaaaagcttcagagttctctaaaaaaactggctgtgaataatatagctggtattgaagaggtgaacatgattaaagatgatgggacagttattcatttcaacaatcccaaagtccaagcttccctttctgctaatacctttgcaattactggtcatgcagaagccaaaccaatcacagaaatgcttcctggaatattaagtcagcttggtgctgacagtttaacaagccttaggaagttagctgaacagttcccacggcaagtcttggacagtaaagcaccaaaaccagaagacattgatgaggaagatgatgatgttccagatcttgtagaaaattttgatgaggcatcaaagaatgaagctaactaaaagtttggtttttggaagctggcatggactagatttaacaaatcagctatgtggttccaaagttttacagacatggagaacatcacctgttactagttcagtaatataaatattttgtatattaataatgctgtttgttcagcatttttcggtcatttgattttgcattttgcacttcctcccaggatatttttttggtcaaaatatgaagtattggtgcagtttgagggtgttttggtttttgattcctggtttttttgttttttgtttggggtatttttggtgtatgtatgtttatgtatgtgtgtgggtatgtgtgtatacagtggagagcaaattggaaaacagttctatttatcctcctccctccccagtagaaataaaaaaaatctttacatttgttacttttcttttccccccgtaagacacagaattaatggaaagtgagtatcttggatttcaaatctgaagagatttttaccattagtggtttgattttaatttgcttggttaactatcatatttttcatacacttctctggatttaaaatatcttgaggtattttgccactggcttcatgctggagtaatgggtaacatatctttggtatggttgccttagattaacttacctagtcagacccagaagaacttcttttactagcttgcttcctaaatgccttttttcctctccttttggtctccaaatggcctggtcagcttttggtaatattcttcctcatcttccacctagcttgagaaggatgttctccatatagagtttagcgagtgcctaatccctccttttgtaagattttgttccctcagcttgaggaacaacttcatcttcaactttttatttctccctgatgttacagtttggtagatttcaaactggaatagctagcatgtgcttgctaaataattttatgccagccttatcctgtatcctagctgttcttaacagcaggtacaaaaatgcctgtttttcagcaaggttgaaattgggaatgtccttttgaatcagaagaaaataggccatagactcatctcccagcacaaatgggcattctatgaaatggtactggccctaggaggatttcctcaaccactctcctactcttggccttgaacctacctctgggttggatcttactattgtagctgctcactataccctcctgcatgcttagaataatgctttgaggggagcactggtaaaacacagtatttatttttttacctcctttaagaggacttggaggtaagttgcattcattcactcaagtttccctcttgctgtctaatagaagcttactttttgctatatcagcatttgttacagccaatatttaaggacaaaatttagaaaatatatcatttcctggcccatcatcaaactaatacagcttaaccttgcagctaccaacttttgtgtcaagctagatatctttatttgatatctaaggtgcaagaccaacaatatattaagagatctgtagacatgaaggcaaagctcttgtattttttttcatccaaacacctcaatttattttataaattcgttcatttttcctgttatgttttatataatatatggactaaacaaaataaaataacagtgcaaaagaggagaatatttcctcttgtgcttttcttg

SEQ ID NO: 492 - protein, 158 aa, Homo sapiens
MNQEKLAKLQAQVRIGGKGTARRKKKVVHRTATADDKKLQSSLKKLAVNNIAGIEEVNMIKDDGTVIHFNNPKVQASLSANTFAITGHAEAKPITEMLPGILSQLGADSLTSLRKLAEQFPRQVLDSKAPKPEDIDEEDDDVPDLVENFDEASKNEAN

SEQ ID NO: 493 - DNA, 918 bp, Homo sapiens
  CDS (27)..(842)
ccagctcacgtcttccccaccccagcatggccgcgtgcaccatgtccgtctgctccagcgcttgctctgactcctggcgagtggacgactgcccagagagctgctgtgagcccccctgcggcaccgccccctgcctgaccctggtctgcaccccagtgagctgtgtgtccagcccctgctgccaggcggcctgtgagcccagcccctgccaatcaggctgcaccagctcctgcacgccctcgtgctgccagccggcttgctgcgcctcctccccctgccagcaggcctgctgcgtgcccgtctgctgcaagcctgtgtgctgcctgcccacctgctctaaggattcctcttcatgctgccagcagtctagctgccagccaacttgctgtgcctcttcctcctgccagcagtcctgctgtgtgcctgtctgctgcaagcccgtgtgctgtgtgcccacctgttctgaggattcctcttcatgctgccagcattctagctgccagccgacttgctgcacctcctccccctgccagcagtcctgctacgtgcctgtctgttgcaagcctgtctgcttcaaacccatctgctgtgtgcccgtctgctctggggcttccacttcatgctgccagcagtctagctgtcagccggcttgctgcaccacctcctgctgcagaccctcctcctccgtgtccctcctctgccgccccatatgcaggcccgcctgctgcgtgcccatctcctcctgctgtgcccctgcctcctcctaccaggccagctgctgccgcccggcctcctgcgtgtccctcctctgccgccccgcgtgctcccgcctggcctgctgaggcctctgctcaggccaggagtccagttgctgatgtgcacatcccccagggccaactggtcctgactcgggttagg

SEQ ID NO: 494 - protein, 271 aa, Homo sapiens
MAACTMSVCSSACSDSWRVDDCPESCCEPPCGTAPCLTLVCTPVSCVSSPCCQAACEPSPCQSGCTSSCTPSCCQPACCASSPCQQACCVPVCCKPVCCLPTCSKDSSSCCQQSSCQPTCCASSSCQQSCCVPVCCKPVCCVPTCSEDSSSCCQHSSCQPTCCTSSPCQQSCYVPVCCKPVCFKPICCVPVCSGASTSCCQQSSCQPACCTTSCCRPSSSVSLLCRPICRPACCVPISSCCAPASSYQASCCRPASCVSLLCRPACSRLAC

SEQ ID NO: 495 - DNA, 4071 bp, Homo sapiens
  CDS (4)..(2457)
accatgatgaagacggagccacgggggcccgggggtcccctccggagcgcctccccgcaccgcagcgcctacgaggcgggcatccaggcgctgaagccgcccgacgcgcccgggcccgacgaggcacccaagggggcccaccacaagaaatatggctccaacgtccaccgcatcaaaagtatgttcctgcagatgggcacgacggcggggccctcgggcgaggcgggcggcggcgcgggcctggccgaggccccacgggcgtccgagcgcggcgtgcgcctgtcgctgccgcgggccagcagcctgaacgagaacgtggaccacagcgccctgctgaagctgggcaccagcgtgtcggagcgcgtgagccgcttcgactccaagcccgcgccctccgcgcagcctgcgccgccgccgcacccgccgtcccggctgcaggagacgcggaagctgttcgaacggagcgccccagcggccgcaggcggcgacaaggaggccgcggcgcggcggctgctgaggcaggagcgcgccggcctgcaggaccggaagctggacgtcgtggtgcgcttcaacggcagcaccgaggcgctggacaagctggacgctgacgccgtgtcccccacggtcagccagctcagcgccgtcttcgagaaggccgactcgaggaccggcctccaccgcgggcccgggctccccagggccgcaggggttccccaggtcaactcgaagctggtcagcaagcggtcccgggtgttccagcccccgccgccgccgccgcccgccccgtcgggggatgccccggccgagaaagagcgatgccccgcagggcagcagcccccgcagcaccgagtggcccctgcccggccgccccccaagccccgggaggtgcgcaagattaagccggtggaggtggaggagagcggggagtcggaggccgagtcggcgcccggggaggtgatccaggccgaggttacggtccacgcggccctggagaatggcagcaccgtggcaactgcagccagccccgcgcccgaggagccaaaggcccaagcggccccggagaaggaggcggcggcggtagcgccgccagagaggggggtgggcaatggccgggccccggacgtggcccctgaggaggtagatgaatccaagaaggaggacttctcggaggcggacttggtggacgtgagcgcctacagtgggctcggggaggactctgcgggcagtgccctggaggaggacgacgaagacgacgaggaggatggggagcccccctacgagcccgagtcggggtgcgtggagatcccggggctgtcggaggaggaggacccagccccgagccggaagatccatttcagcacggcgcccatccaagtgttcagcacttactccaacgaggattacgatcgtcgcaacgaggatgtggatcccatggcagcctctgctgagtacgagctggagaagcgtgtggagaggttggagctgttccctgtggagctggagaaggactccgagggcctgggcatcagcatcatcggcatgggcgccggggcagacatgggcctggagaagctgggtatcttcgtcaagaccgtgacggagggtggtgcggcccatcgggatggcaggatccaggtgaatgatctcctggtggaggtggatggaacaagtctggtgggagtgacccagagcttcgcggcgtctgtgctccggaacaccaagggccgagtgcggtttatgattggccgggagcggccgggagagcagagcgaagtggcccagctaattcagcagactttggaacaggagcgatggcagcgggagatgatggagcagagatacgcccagtatggggaggatgacgaggagacgggagagtatgccactgacgaggatgaggagctgagccccacgttcccgggtggtgagatggccatcgaggtgtttgagctagcggagaacgaggatgcactgtcccctgtggacatggagcccgagaagctggtgcacaagttcaaggagctccagatcaagcatgcggtcactgaggcagagatccagcagctgaaaagaaagctgcagagcctggagcaggagaaggggcgctggcgggtggagaaggcgcagttggagcagagtgtggaggagaacaaggagcgcatggagaaactggaaggctactggggtgaggcccagagcctgtgccaggctgtggacgagcacctgcgggagactcaggcgcagtaccaggccctggagcgcaagtacagcaaggccaagcgcctcatcaaggactaccagcagaaggagatcgagttcctgaaaaaggagactgcacagcgtcgggttctggaggagtcggagctggccagaaaggaggagatggacaagctcctggacaagatctcagaactggaaggaaacttgcaaacactgaggaattccaattctacttaacaggaatcattccatgactggacaataattaacccccctcccattgtcctccctcccctgtcctcaacaccccacccctcccccttccagcctggggacaggtgccccgactccccccacccctccaccccacctcccccagcttcagggaccagagggctcatatcacaggcccccttaagatggcctgggcagacagaggtggctagaagggcagcctctttcttgccccatggggctgaggcacagaggccgagggctgccgagggctggcctggtggtcgacggacacaagcacctgcagatcaaactgccagactttacacactccagcttttgtctctggactggaacggggctggggctctcccagcatctgccaactgggggctgctccctgcccatggggcacctgggtggcccctgggcctcttgacttgagattctaccttctcggcccttccctctccccccatcattgtgccgtctctgttgcattctgaccctcccgcctggggggtgggggcgttgcctcaacacctcccccatccctgttccctgtcctgggagggatagagtccaccccagagcccggaggctgggcctggccctggccctgcactgatttctcatgtgtccttcgggaaaagggggagtgagagtgggaaaaagggagagttcaggacacctggtccccagctccccattgcctggggcagcagccctcaatttctccttgtgcctcccctcttccaggtgccaaatagccataacctcgtcttggaactgttatgtggcctctctggggtccaggtttcctggtcaagcctgggaatgccagggaggaaagggggtctggctacagcgaccctggtcttaggcaaggggaacatttctccctggagagtcaggtcctatcctgtgctgccctgtctgcccagcccagggcgatgcctggaagcctactgacattgcagggagtcagcctcgcccccaccccctactggttttccaatgttttgactggagggcaaaattttactactactcatctttttggagaccagggctgccctgctggcagcctgccttctaagtgaaatcgactctgtttccccactttaaccccaaattggggcttggaccaagggaggtgagaccacctcccccaggtcccctcccctttcaaaatccatctcattttgccacttcatgcccctgccctaactgggtttttgttcattttttaaaaacagaccacccatcccatccgttttggcttcttgtcccctgtaaatagaccatgacttcgatcagtatttcttgtccccaccccttcctatccccagatgtgcccccatcccctgaaggagctggctgtctcagtcctgggctcgcgcacttcaccccggcagatggagggggcggaaccgggtgggcggggccgcttcgggctgcttgggccagcggccacccctgcccagccgtcgggagggccgcatctctgtatataatatatatatgtatgtattgttcccggttttgtacggaccatgccctctgtcaggtcgtccccataaaagcagcccccagaaaaaaaaaaaaaaaaaaaaa

SEQ ID NO: 496 - protein, 817 aa, Homo sapiens
MMKTEPRGPGGPLRSASPHRSAYEAGIQALKPPDAPGPDEAPKGAHHKKYGSNVHRIKSMFLQMGTTAGPSGEAGGGAGLAEAPRASERGVRLSLPRASSLNENVDHSALLKLGTSVSERVSRFDSKPAPSAQPAPPPHPPSRLQETRKLFERSAPAAAGGDKEAAARRLLRQERAGLQDRKLDVVVRFNGSTEALDKLDADAVSPTVSQLSAVFEKADSRTGLHRGPGLPRAAGVPQVNSKLVSKRSRVFQPPPPPPPAPSGDAPAEKERCPAGQQPPQHRVAPARPPPKPREVRKIKPVEVEESGESEAESAPGEVIQAEVTVHAALENGSTVATAASPAPEEPKAQAAPEKEAAAVAPPERGVGNGRAPDVAPEEVDESKKEDFSEADLVDVSAYSGLGEDSAGSALEEDDEDDEEDGEPPYEPESGCVEIPGLSEEEDPAPSRKIHFSTAPIQVFSTYSNEDYDRRNEDVDPMAASAEYELEKRVERLELFPVELEKDSEGLGISIIGMGAGADMGLEKLGIFVKTVTEGGAAHRDGRIQVNDLLVEVDGTSLVGVTQSFAASVLRNTKGRVRFMIGRERPGEQSEVAQLIQQTLEQERWQREMMEQRYAQYGEDDEETGEYATDEDEELSPTFPGGEMAIEVFELAENEDALSPVDMEPEKLVHKFKELQIKHAVTEAEIQQLKRKLQSLEQEKGRWRVEKAQLEQSVEENKERMEKLEGYWGEAQSLCQAVDEHLRETQAQYQALERKYSKAKRLIKDYQQKEIEFLKKETAQRRVLEESELARKEEMDKLLDKISELEGNLQTLRNSNST

SEQ ID NO: 497 - DNA, 2136 bp, Homo sapiens
  CDS (472)..(975)
aagacattcatcctcccggaggcccgcgccgccctcgccctgcacgcctagcgttgtcccgcggccaggcccggccggagcggcggcgcctggatgtggacctggctgcggggagacgggcgccggccccaaagcgactttcggtcctcgacgcgccccgccccacccctgcgatgaagagggcgtctgctggaggttccaggccccgattcccttatcctgggggacgacagcatccatagcctggactttgtgtcgagccgagcctggacttccctgactatgggcccgggggcctgcacgcagcctacctgccatccccaccgctcagcgcctctgatgccttctcattgctttgtgctccctgagcctcaaggcctcaagccggcagggcggggactacgtggccctgcagcccctgtgctccgagggtgggcctcccatgccccaccgtagcatctttgcccccccatgcactgcccaaccacaatcgcagcctgtcctacaataatgtgctcaaccctggctcgcctggtggccacgcctgcctcgcccatccagcagttggcgtggccggataccactcaccctacctgcaccctggggcaacgggcgacccaccatggcccctgccccacagcttcagtcccgtgctgggcccccggccccaggagccctcgcctgtgctctacgacatcctgtccaggaccatcatggcatccatccaggagcgcaaggacagggaggagcgtgagtgcctgctgcgctcccaggccgactcactcttcggcgactcaggcgtctatgatgctcccagctcctacagcctgcagcaggccagtgtgctgtctgagggcttctgaggtcctacgctgtgctacagctctacagatgaccttgtggccaggcccggcttcggcggcgcctgcaaccctgtcctgcagacatcattgtcctcgctttccagctccgtgagccgtgcactgcggacgtcgtcctcctccctgcaggctgatcaggtggggaagctgaggcaggaagccctttagtcacttgccgaaggccacgctgttacccatgggaccggttttgggcggccgaagagcactcatggggccggattcacgccccgggcccgttccctcctgctctctggtgctcctcacgccattggccccactgcctctcactgcccgtgagtccctgtgcccgtgtcctccttcttgaacccctcagccctcagttaaccctcagaaagctggctcggagaagtccttgtgtggtatctgggaggcagagtttgccgtgagctgagattgtgccactgcacgcactccagcctgggcgacagagcgagaccccatctcaaaaaaaaaaaaaaaggcctcacgggactagaagcgtcttaccctgacctcacacctgctggacatcaggctggggagagaatcggggaagagggcattttccaacaggactggaaggccagtcgtggtccttggtggtgagagctagccaggccgccggccttctccccggaagcctgcagggtcccctctgatccctgcacctctggggggtcacaccaactgcgggtgtttcctcaccacgctgggcgcttggtgagcacgttctgccttgagacctggcatttctttgataacatttcttctcgtttcctgctcattctggaactcctgtcagtcagatgttgggccttttggatagattctgtgagtccttctttctacctttgcttgtagataagattttccttgaatccaaacacacacactctctctgctttttaaaaaattagttttggggctggatgtagtggcttacacctgtagtcccaggcactttgggaggccgaggcaggcagatcacttgaggtcaggagttccagaccagcctggccaacatggtgaaaccccgtctctactaaaaatacaaaaagtagctgaatgtggtggtgtgcacctgtaatcccagctactcaggaggctgaggcaggagactggcttgaacccgggtggcagaggttgcagtgagccgaaatcacaccactgtactccagcctggtgacagagccagactgttttaaaataaataaaaataaaaaattggttttgg

SEQ ID NO: 498 - protein, 167 aa, Homo sapiens
MHCPTTIAACPTIMCSTLARLVATPASPIQQLAWPDTTHPTCTLGQRATHHGPCPTASVPCWAPGPRSPRLCSTTSCPGPSWHPSRSARTGRSVSACCAPRPTHSSATQASMMLPAPTACSRPVCCLRASEVLRCATALQMTLWPGPASAAPATLSCRHHCPRFPAP

SEQ ID NO: 499 - DNA, 6640 bp, Homo sapiens
  CDS (265)..(3063)
gagcgggccgacggccattttgtgaagcggcgaaggaggtggtggctgcgttgggctccgggaagccgttcgggctggggctgtcggccgcggggcggaggcactcgcgcggggggtaattcggggtctgggttctggtgccgcgcagctttccccgtctaaaagttggttttaattggttgcccacaggattgacttggcctctacttcttgttaaggaaattcatctcttgttttatcaggtgtgtgtggtttcagcgcagcatggctgtggtcatccgtttgcaaggtctcccaattgtggcggggaccatggacattcgccacttcttctctggattgaccattcctgatgggggcgtgcatattgtagggggtgaactgggtgaggctttcatcgtttttgccactgatgaagatgcaaggcttggtatgatgcgcacaggtggtacaattaaagggtcaaaagtaacactattgttgagtagtaagacggaaatgcagaatatgattgaactgagtcgtaggcgttttgaaactgccaacttagatataccaccagcaaatgccagtagatcaggaccaccacctagctcaggaatgagtagcagggtaaacttgcccacaacagtatccaactttaataatccatcacccagtgtagttactgccaccacttctgttcatgaaagcaacaaaaacatacagacattttccacagccagcgtaggaacagctcctccaaatatgggggcttcctttgggagcccaacgtttagctcaactgttccaagcacagcctctccaatgaacacagtcccgccgccaccaattcctccaattccagcgatgccatctctgccaccaatgccatccattcccccaattccagttcctcctccagtacctacattgcctcctgtgcctcctgtgcccccgattcccccagttccttctgtgccacccatgaccccactgccacccatgtcgggcatgccgcccttgaatccgccacctgtggcacctctacctgctggaatgaatggctctggagcacctatgaatttgaacaataatctgaatcctatgtttcttggtccgttgaatcctgttaaccctatccagatgaactctcagagcagtgtgaagccactccccatcaaccctgatgatctgtatgtcagtgtgcatggaatgcccttttctgcaatggaaaatgatgtcagagatttttttcatgggctccgtgttgatgcagtgcatttgttgaaagatcatgtaggtcgaaataatgggaatggattggttaagtttctctcccctcaagatacatttgaagctttgaaacgaaacagaatgctgatgattcaacgctatgtggaagttagccctgccacagaaagacagtgggtagctgctggaggccatatcacttttaagcaaaatatgggaccttctggacaaactcatccccctcctcagacacttcccaggtcaaaatcgcccagtgggcagaaaagatcaaggtcaagatcaccacatgaggctggtttttgtgtttacttgaaagggctaccatttgaagcagaaaacaaacatgtcattgatttttttaaaaagctggatattgtggaagatagtatttatatagcttatggacccaatgggaaagcaactggcgaaggctttgtagagttcagaaatgaggctgactataaggctgctctgtgtcgtcataaacagtacatgggcaatcgctttattcaagttcatccaattactaagaaaggtatgctagaaaagatagatatgattcgaaaaagactgcagaacttcagctatgaccagagggaaatgatactaaatccagagggggatgtcaactctgccaaagtctgtgcccacataacaaatattccattcagcattacaaagatggatgttcttcagttcctagaaggaatcccagtggatgaaaatgctgtacatgttcttgttgataacaatgggcaaggtctaggacaggcattggttcagtttaaaaatgaagatgatgcacgtaagtctgaacgcttacaccgtaaaaaacttaatgggagagaagcttttgttcatgtagttaccctagaagatatgagagagattgagaaaaatccccctgcccaaggaaaaaagggattaaagatgcctgtgccaggtaatcctgcagttccaggaatgcccaatgcgggactgcccggtgtgggactgcccagtgcaggacttcccggtgcaggcctgcccagcacaggactgcctggttcagcaataaccagtgcaggactgcctggtgcgggaatgcccagtgcaggaatacctagtgcaggaggtgaagagcatgccttcctgactgtaggatcaaaggaagccaataatgggcctccatttaactttcctggtaattttggtggatcaaatgcctttgggccaccaatccctcctccaggattaggaggcggggcctttggtgatgctaggcctggtatgccttcagttggaaacagtggtttgcctggtctaggactggatgttccgggttttggaggtggaccaaacaatttaagtgggccatcgggatttggagggggccctcagaattttggaaatggccctggtagcttaggcggtcccccggggtttggaagtggccctcctggtcttggaagtgcccctgggcatttgggtgggccaccagcttttgggcctggccccggccccggccccggccctggcccaatccatattggtggtccccctggctttgcatctagttctggaaaaccaggaccgacagtaattaaagtgcaaaacatgccctttactgtgtctattgatgagattttagatttcttttatggctatcaagtaatcccaggctcagtgtgtttaaaatacaatgaaaaaggtatgcccacaggtgaagccatggtggcctttgagtctcgggatgaagccacagctgctgtcattgacttaaatgacaggcctataggttcaagaaaagtaaaacttgtattagggtagccattcacatcattttttatagggtagatcttcatattgctgtgattaatgcatccagattgttttcctagtatttccaggttagaacctgtggattgtttcaattgcatatagcttggtttccataacatagagcattggttgactgtttacagaagactcactcaccaggataaacattgctgtatgttacagtaaagctatctggagagaacacataaatgattttggcataccattagagaaaccatttgtaaaactcaaatgaccacataaagcttatcaaggagtctagattggttttgttttataccatatgggatgaagaaaatagaaatgtcagtagaactcattgagggtgctcttgccagctgctgaaaatagaagttggctactctcagaatttggtttaaagctggacagatttgctttgttatagggtaaagctttgtctaaagtcctcattttcttttaaaattgaataaaatttctgtatacagattcattgtatgtacctttattgcttcttaagggtccttgctgtatagacagtcctgcttcagaagttgctgctttgtttgtctaattgactcatttgtaaatgagcagaactgttttgttggtttttttccctaaatataaaagtccacacttcgtttgtgctataacctcaaactttgatttctaatgtcacacttaaaactgtgtggaataagacttttgccataaaaataaactatggagtcctttatctaccagagcctttttggtttgaccgccacgatttaggttagtcagtttaaaaattgttcatgttgtttggatggtatcgaaaaccagaaaccacttttaataatgtgtttaagatacttgatttgaagtccttttcatatggactaattgtagtatcaatttcctcctgtcccgattatgtgaaattttggcctttaaacaaagaggggcccattcataagaaagtgttatatctaggtttttaaaactgaagttgaaattatctttgttagcagtagtagtatagaataaaagatccgtatgctggttcgtagattgatacgtgttagtcctgttatttggaggctttttggcatagttgttcgatcaggagcctgtttactaaaagtcttcatacagagtacaagtgcagccgccagaggagaaaattgagattcttgaccctttcatactcttttctttggtattcaggacactaaggcaggaggaccacatgagttctggttggtaagtgtccttgtcatgaaaacacttgccttacaaggctctaattatgatttccctagtcagtgctctgaagatgtgtcacattatattataaacaatacggaaggggagataggtgagatgatatgaaaaacaaattttctcactgtcataaaaggctctaattatggttactttccttgtgatgaaaaacttggccttacagggctctagttatggttactttccctagtcaatgctctgaaaatgtgtcacattataaacaatacagaaggagagatagatgagagatcatgaaaaccaaattttatcttttacatggcccctttgtcttcgtttgaaacatccccaacatttcctacaaatcagcgtagttacaaaggggtcagtcttttaaaataagtatttcctattaaactatatatatatacagtgcctttttggtgttgtgagtcagtggaacactgaaatacagcggttgtgtaatttaagagtggcaacagtttcatttgataagatttgaaaaggctttttatcactacaatcttagaggattgacagtacaggatttttgtttaagagaaggattgtttagactcaagaggtgactatgttgtgggtcttttgataattcatgaatacagatttgctttgaccgatcactagatactgcctcctcaatttcaaaagcaatataacgtttgtatatgctgtttaatttaagttaatgttaagtaatcatttctcattccaaagacaatgcaaaaaacttcagcactgcttgagagttgtatttcagccacagatattttctccattggaaagctattttcattttagaaaaatgggttgtttgaagatgaaagtcttttatcttttttcacaatttattttggttatatgttcgtacattcttattaaatatttcatacactttattgcaactactttgttatttctacatcttagataaatgctgaaaaggaaaacgatttcattgttcatctaattaaataaattaaaagagcggtttgtgtagaaattggagagaactatgttttatatgaatcacaacagtgctcgttgtggactgtaattaaatgctttgccctctggaacttgatttttgtgtatctgagatttattaacagtgctaactgctaaggatactgtttatcttgttctgggcattggagtttcagtttttaaaaaattcttgaaaatgtattctgtgaaactactcatacctctcttcctgcgaattttctcctaagaactaggtttggggtagaaatgaattgacattattttctcatttgctttgtatggtatgaaggatttgtaaagctttgctcaaagttgtgtgcatttgtaaacactatcatgatattttcaattttatgtgtaaattttattgtctgtttttggtgactctgacattaatggaagagaatattttccattagatttaattttttttcctctcccttctgattttttttttattggtgttcatttttcttttgatttaaaggattagagaaatctacaaatgtatgtcataaataagcaaatttgtaaacttttctgaactttagtgaaacatttagttcacaagcataatttggaggtgtgttctgtgtttacacagtagtttggatgtacaattattattagtggctttttaaaaaatgaaacagtgttaagtgaaatgtagttcctagctttgtactccaagttgtcaaagcatcaacaatgaaaattcgattaggaaactttatttaaaatttcaggtagtaatattcagtgtagttaaggccagtcttaacccactggatgaaaatctaggactgtatggaagtaagcaaacattacatttttaggtggaaatagtcagccttgcataaaaacaaggatgcgtgaaagccttaaattccagctcccttttactggagtctgtggttgtgtacaggtatgggccaagtgtaaaatctcatcaattttaagaacactcgggaaatgagtaaagaaaatgtaaaattgctgctagtcaaatcttttggaaagaatttctggaagtggtcactttaaaaattattttccacccttgcaaaattgccacatttaaattgttttactggcagttctatagtagtccagactttagaaaccaaacacaacaaaatggcttgttgccaatatggccacaacattgccagcaaatactgccttggcatcactcagcagaggtttttgtttataaagatgaagtcttgaatactgttcaataaacttgtcaaaaaataaaaaaaaaaaa

SEQ ID NO: 500 - protein, 932 aa, Homo sapiens
MAVVIRLQGLPIVAGTMDIRHFFSGLTIPDGGVHIVGGELGEAFIVFATDEDARLGMMRTGGTIKGSKVTLLLSSKTEMQNMIELSRRRFETANLDIPPANASRSGPPPSSGMSSRVNLPTTVSNFNNPSPSVVTATTSVHESNKNIQTFSTASVGTAPPNMGASFGSPTFSSTVPSTASPMNTVPPPPIPPIPAMPSLPPMPSIPPIPVPPPVPTLPPVPPVPPIPPVPSVPPMTPLPPMSGMPPLNPPPVAPLPAGMNGSGAPMNLNNNLNPMFLGPLNPVNPIQMNSQSSVKPLPINPDDLYVSVHGMPFSAMENDVRDFFHGLRVDAVHLLKDHVGRNNGNGLVKFLSPQDTFEALKRNRMLMIQRYVEVSPATERQWVAAGGHITFKQNMGPSGQTHPPPQTLPRSKSPSGQKRSRSRSPHEAGFCVYLKGLPFEAENKHVIDFFKKLDIVEDSIYIAYGPNGKATGEGFVEFRNEADYKAALCRHKQYMGNRFIQVHPITKKGMLEKIDMIRKRLQNFSYDQREMILNPEGDVNSAKVCAHITNIPFSITKMDVLQFLEGIPVDENAVHVLVDNNGQGLGQALVQFKNEDDARKSERLHRKKLNGREAFVHVVTLEDMREIEKNPPAQGKKGLKMPVPGNPAVPGMPNAGLPGVGLPSAGLPGAGLPSTGLPGSAITSAGLPGAGMPSAGIPSAGGEEHAFLTVGSKEANNGPPFNFPGNFGGSNAFGPPIPPPGLGGGAFGDARPGMPSVGNSGLPGLGLDVPGFGGGPNNLSGPSGFGGGPQNFGNGPGSLGGPPGFGSGPPGLGSAPGHLGGPPAFGPGPGPGPGPGPIHIGGPPGFASSSGKPGPTVIKVQNMPFTVSIDEILDFFYGYQVIPGSVCLKYNEKGMPTGEAMVAFESRDEATAAVIDLNDRPIGSRKVKLVLG

SEQ ID NO: 501 - DNA, 2816 bp, Homo sapiens
  CDS (449)..(1918)
tgcgcagcaatgccatcggttaaagcgcatgcgcaagatgagctattgcggaagtgaggggagggagaggccgagagaaatttcggtactgcgcatgaaccgagcgtgacgttgaggtttgaaataaccggcaaagagtaaaggctgaaactagcttcctgaaagcttcgtagggcccgagccctgtgagcccaggttctgcgcccactaggaggtgtcatgctgactgctttttttaaagccctagaatcttggcttcggcgtttggggtaagctccgttctcgttctcaagcgcgtttccgcgaactctcgcgggattgacgggccgtctcgagagccggcatctcctaggagctagtcctggtcctcggctaggcggcttggggtcgcggcgtaactggggagccagcctgacgccggcggaccccgcctgtgatcctggcaacgatggatgatgacttgatgttggcactgcggcttcaggaggagtggaacttgcaggaggcggagcgcgatcatgcccaggagtccctgtcgctagtggacgcgtcgtgggagttggtggaccccacaccggacttgcaggcactgtttgttcagtttaacgaccaattcttctggggccagctggaggccgtcgaggtgaagtggagcgtgcgaatgaccctgtgtgctgggatatgcagctatgaagggaagggtggaatgtgttccatccgtctcagcgaaccccttttgaagttgaggccaagaaaggatcttgtagagaccctcctgcatgaaatgatacatgcctatttatttgtcactaataacgacaaagaccgagaagggcatggtccagaattttgtaaacatatgcatcgcatcaacagcctgactggagccaatataacggtataccatacttttcacgatgaggtggatgagtatcggcgacactggtggcgctgcaatgggccgtgccagcacaggccaccgtattacggctatgtcaaacgagctactaacagggaaccctctgctcatgactattggtgggctgagcaccagaaaacctgtggaggcacttacataaaaatcaaggaaccagagaattactcaaaaaaaggcaaaggaaaggcaaaactaggaaaggaaccagtattggccgcagagaataaagataaacccaacagaggtgaggcccagctagtaatcccttttagtgggaaaggatatgttctaggagaaacaagcaatttaccttcacctgggaaactgatcacttcacatgccattaataaaacccaagatcttttaaatcaaaaccattcagcaaatgctgtaagacctaattctaaaatcaaggtgaaatttgaacagaatggttcaagtaaaaattctcatctggtctcccctgctgttagtaacagtcaccaaaatgttctaagcaactactttcctagagtatcatttgccaaccaaaaggctttcagaggtgtgaatggatctccaaggataagtgtaacagttggcaacatccctaaaaactcagtctcttctagttctcagagaagggtttcatcttctaagatatccctaagaaattcttcaaaagtaacggaatcagcatctgtgatgccatcccaggatgtgagtgggtctgaagatacattcccaaataaacgacctaggctagaagataagactgtttttgacaatttttttatcaagaaagagcaaataaaaagcagtggtaatgatccaaagtatagtacaaccacagctcagaattccagcagttcatccagtcagagcaaaatggttaattgcccagtttgtcagaatgaagttctggagtctcagattaatgagcacttggactggtgccttgaaggtgacagcatcaaagtcaaaagcgaagaaagtctttgaaaaaggtttcaaagtctcaagtaccacctgtattatctcactaatgtgctatgtcagccagtcaggaagttctggttaatactaagatttgtaggttataatctagttcacataaccaatagaaagtgtcctattttatatatacgcatataagattgtaattttaagatgttttgtgtctcagggtgctacattcactcttgccttaggtatactgtaacccaggttctgcctgtcgtgtataagttttagatacttttgttctttcttgctcttaaggattttaaaaacctgttaatctttttatttgtatactttcctaaaaatattcatatggggaatcctgtcaggtgtttggttatattgactatttattaatagtattagaactcattccctgaactgatgtaaatcttcatagtgtcagacatactgaccaaaaccacaatctagactacaaagtatattgttttagagtactcaaattgtattatttattaatttttttgtttgcaaaatcttaacaggaactgtattttctatattttaaagaattttatttgtcccacttttactaaacagtggcagcagattttaagttaaagaatatggaatatagtaaaataagtaaatttcttttggaatatttttagtaacaaatagccactataattctgtaggccaaattttatattgagtttagctgttttctcaaaatttagcagagtggttaaaattctgtgctgataagtaactgatacatataacataaacataacaaagttgcctagttgatgtaacagtggaaagttatctggaaatagtattttgaactttaagccaagtttaaaacattataataaaaggaataccatttgtgcaaaaaaaaaaaaaaaaa

SEQ ID NO: 502 - protein, 489 aa, Homo sapiens
MDDDLMLALRLQEEWNLQEAERDHAQESLSLVDASWELVDPTPDLQALFVQFNDQFFWGQLEAVEVKWSVRMTLCAGICSYEGKGGMCSIRLSEPLLKLRPRKDLVETLLHEMIHAYLFVTNNDKDREGHGPEFCKHMHRINSLTGANITVYHTFHDEVDEYRRHWWRCNGPCQHRPPYYGYVKRATNREPSAHDYWWAEHQKTCGGTYIKIKEPENYSKKGKGKAKLGKEPVLAAENKDKPNRGEAQLVIPFSGKGYVLGETSNLPSPGKLITSHAINKTQDLLNQNHSANAVRPNSKIKVKFEQNGSSKNSHLVSPAVSNSHQNVLSNYFPRVSFANQKAFRGVNGSPRISVTVGNIPKNSVSSSSQRRVSSSKISLRNSSKVTESASVMPSQDVSGSEDTFPNKRPRLEDKTVFDNFFIKKEQIKSSGNDPKYSTTTAQNSSSSSSQSKMVNCPVCQNEVLESQINEHLDWCLEGDSIKVKSEESL

SEQ ID NO: 503 - DNA, 5475 bp, Homo sapiens
  CDS (177)..(3068)
caatgccggcgttcgggaggcgcaacgtcggcggtcgctgagtatccagcccgcagcagtgacggccggcaggagcgtgctcttccccgcggctcgtgctctccaggagtccggagcatggtcctgggtcaccgttggtgtagcgtgttggtggaacgtggacgcctagagggaggatggtgggctgtggggtggcagttttatgtttgtgggtttcctgcggcgctgcagcgggacagctcgagtactcagtgccggaggagacggagcggggcgtagccgtaggcaatctctccgcggacttgaggctgccagcggccgctatgtcctcgcggaactttcgcttcctttccagccaccgcgagctctacttcggggtggatctacccagcggcaatttggtggtcagagagccggcggaccgcgaacagctgtgcagggccaaagctgcctgcgtcttgacctacgacctggtgctcgaggacccgctggagctgcacaagattcggattcacgtcctggacaccaatgacaactcacctctctttcctgccggcgacgtgcagctgcacatccccgagttcctgacgcccggagcccgctttactctcccgaatgcccaagatgacgacgagggaagcaatgggatactaagctacagcctaagccccagtcagcactttcgcctggacatgggatcgcgggttgacggcagcgaatacccggagttggtgttggagaaagcactggatcgcgaacagcgcgccacccacctgctggtgcttacagctcgggacggcgggctacctgcccgctcaggagacgcacaagtcaccatcattgtggtggacacaaatgacaacgcgcctgtatttgagcgctccgtataccgcaccaaggttccagagactgcacccaatgggactgtgttattccgagttcaagccttggatccagatgaagggtccaatggggaagtccagtactccctaagcaacagcacgcaagcagagctgcgacaccgctttcacgtgcaccctaaaagtggggaggtgcaagtagctgcttcactaggtccgcctgaaacgctcttggaggcatacattgaggcgagggacgaaggtgtctttggtttagctagcaccgctaaactgctggtggaggtgactgacgtgaacgatcatgcccccgaactggacttcctgactctttcgaacccagtacctgaggacgctgcccctggcacagtgattgctctctttagtgtaaaggatgaagacctcgattctaatggtagggtcatttgtggcatgtctagtgcaggcccttttcagctgacggcttcctttgacaactactacagcctgctgattgatgggcccctggaccgggagcagatcagtgaataccaagtcctgatcacggcctcagatagtggctcacccccacttagcacccgaaggacaatcactgtgtcagttgctgatgtgaatgacaatacaccaaactttcctcaaccccagcaggaacttttcgttgctgaaaacaatggccctggggcctctctaggccgagtgtttgcccaggaccccgacctggggaagaatggccttgtctcttatgagctgttggatgttatctctgaagggccatcagcctctagcttgctggcagtggaatcatccagtggggccatcactgccaaaacttcctttgactttgagcagctcagggggtttcatttccaagtagaaggccgggatggtggcattcctcccagaagtgcaacagtgactataaacttgtttgtggtagataggaatgacaattatccggttatcttgtttcccttgcccagaaatggttctgtcccagtggaaattgtgccccgctctgccaggactggacacttggtcacaaaagtggtagcagaggatgctgacagtggttctaatgcctggctttcctaccacatctcccgggcgtctgactctagtctctttagaatttcagccaatataggtgagctccgtactgctcgcttagttcttcccactgatgcagttaagcagagggtggtggtagtggttcgggaccatggagacccaccactttcctcctctgtcactctgggtgtgctgttgagcaactctgtccctcagttacttccagactttgaagatgtctgggaaccaggagggcagctttctgcccagaacttgtatttagtaattgccttggcttgtatttcctttttatttctggggtgcttacttttcttcgtgtgtaccaagttgcaccagagcccaggctgttgcgctcagagctgctgtcgctctacagaggatctgaggtatggaagtaagatggtttcaaatccttgcatgacatcagccaccatagatgtcactacagttgagagactttctcagacttatctctatcgggcctctctgggacttggttctgataataacagtttgctgttgcgtggggagtacaatgctgccgacctgcgaaatcttgccactggggtaggactgaatttgccaatatcctgtattcagattcggaataggaaaggggatcacgctaatgtcaatgccatgccacgacagcccaaccctgactggcgttactctgcctccctgagagcaggcatgcacagctctgtgcacctagaggaggctggcattctacgggctggtccaggagggcctgatcagcagtggccaacagtatccagtgcaacaccagaaccagaggcaggagaagtgtcccctccagtcggtgcgggtgtcaacagcaacagctggacctttaaatacggaccaggcaaccccaaacaatccggtcccggtgagttgcccgacaaattcattatcccaggatctcctgcaatcatctccatccggcaggagcctactaacagccaaattgacaaaagtgacttcataaccttcggcaaaaaggaggagaccaagaaaaagaagaaaaagaagaagggtaacaagacccaggagaaaaaagagaaagggaacagcacgactgacaacagtgaccagtgaggtcctcaaatggaaacaagccacttagccagtttttgtaataatggcaaatctctcccatgtagcaattccctgctcctttttcctatctacatgagccctcttagagacctcagaaatctgcagaaagttccctgtgtctgtctagaacgcatttaacaggttttgtcgtaaaagctttactaagtctggtgttaactctttctctccactctggcttgttttcagaacctaaaaagcagacccaagtttcctttctcctccgccgcaaaggagaggcttcccagccccgccagtgagaggttggactctctgccctgtgctccggggatcctgtcttgatgacacttgcagggcaggctgaaaagttttgagattgagcagcttgggagtttgtggccactgggtatgtgtggctaccgcgggtatgcgagtgccagatattggctgagacgagccagcttagactaattggtacaaggaaggcaagaaaacaaagacaaataaacagcggaagttatcagtatggaggggaagtgtaaacttaaagggaccagactttctaaatcttacaactcaagaggtggcagccaccctctaggagacaaaactacccccactgacaaggctttaggagaccctaaagtctgttggctgtgacgtcattatacctaaaatctgcatcatacctgcaagccaacagttcagtgttttaacagagaaccaccctgggaaacagaagcagatctgatgtgtttcctatacatgtcctgtgctcactttattaaaaattcttttgcacacaatgtttatgaaaaggccagatccttttccaatacttatgcaaaagcaaaagaaaaccccgacacctcacctttcgctgtttgttgtttcatagatttatttaaaaaaagagaaagtctatagctataaatctttaaagagaaatatgaatacaattcccctaaactctcctcaaaagagaattcagtctacagccatttaaatgatcattgctgctacagaagtgctttaagagaattgcctgaaacatctgtattatatcggccacctgccaatcacagctttactctttcaggtcactctggggctgcctcttgcatgtattactaaataaaatgatctctctttctctctctctctctcttttctaagaaacaattatgtgcactttgatacacaaccttctctaaccaactatatatcaagacccaaaaattgaagaaaaatattgttttctcatacagtgagcagatttttcaatctactaattctgtgacttgtcttggtgtgctagcctacaccttctctttggtttagttttccttttctataacactctgaattgctaatcttactaacacctatgatgttacctgaaatcaatctcccatatgtatgctgtatgctatgctaagactcctgaaatatacttactctgtgcttgtgtatgtgaatgttaatgcaactattacctagagtgaactttaagctttattgttgaatgtaattccattatatttccttttgtacacctgtgaaaaagtggagtagtgtttttttaaccattgttaatcagcttttgtgtatgaaagacacagtaaaatttctttcttaaatcaagatactggtgattcaaggaattttatttatggtccagccaagagccatctcgtgccaagacttctgctggcaagggaatggataaagctgttttgttctagtaacaattttggaatgaatactgacaatattccatgagggtgtgcaagcacaaattttaccaatctgacctctttgaagttgcagaatgctttgaaattctaatggtatctgaaatatcagctcatagaaagtaacaaaatttgctgtcaccttaaataagacattttaattttgttataatgtacaatttagaagtttgattaattatattatctatttaggcattaatataaaagaggtaggagtctgttatttaaaaaaagcattaaatttaaaaaaaaactgtcttgtctacttttagcttcattctcccatattttgaagggtgtgtaacttcagctctgcaggattgcatggggtaaaacttgttaccaacacatgtgaaccattgctacattgtaggttgtgatcattttgccccactgaagcccatgtatctgaccttacgtgccttttgaactaggagaatcgggctaatttattaatgatgataattataatgtatctgtacagcactttttacatttgcgaagtgctttccaatccatgttagttactagttattacagctgtaaggataaaacacgtcatgtggattcattttgaattggtgctattggtatttcctctgttattgctaataaatgaaaatggtggtatg

SEQ ID NO: 504 - protein, 963 aa, Homo sapiens
MVGCGVAVLCLWVSCGAAAGQLEYSVPEETERGVAVGNLSADLRLPAAAMSSRNFRFLSSHRELYFGVDLPSGNLVVREPADREQLCRAKAACVLTYDLVLEDPLELHKIRIHVLDTNDNSPLFPAGDVQLHIPEFLTPGARFTLPNAQDDDEGSNGILSYSLSPSQHFRLDMGSRVDGSEYPELVLEKALDREQRATHLLVLTARDGGLPARSGDAQVTIIVVDTNDNAPVFERSVYRTKVPETAPNGTVLFRVQALDPDEGSNGEVQYSLSNSTQAELRHRFHVHPKSGEVQVAASLGPPETLLEAYIEARDEGVFGLASTAKLLVEVTDVNDHAPELDFLTLSNPVPEDAAPGTVIALFSVKDEDLDSNGRVICGMSSAGPFQLTASFDNYYSLLIDGPLDREQISEYQVLITASDSGSPPLSTRRTITVSVADVNDNTPNFPQPQQELFVAENNGPGASLGRVFAQDPDLGKNGLVSYELLDVISEGPSASSLLAVESSSGAITAKTSFDFEQLRGFHFQVEGRDGGIPPRSATVTINLFVVDRNDNYPVILFPLPRNGSVPVEIVPRSARTGHLVTKVVAEDADSGSNAWLSYHISRASDSSLFRISANIGELRTARLVLPTDAVKQRVVVVVRDHGDPPLSSSVTLGVLLSNSVPQLLPDFEDVWEPGGQLSAQNLYLVIALACISFLFLGCLLFFVCTKLHQSPGCCAQSCCRSTEDLRYGSKMVSNPCMTSATIDVTTVERLSQTYLYRASLGLGSDNNSLLLRGEYNAADLRNLATGVGLNLPISCIQIRNRKGDHANVNAMPRQPNPDWRYSASLRAGMHSSVHLEEAGILRAGPGGPDQQWPTVSSATPEPEAGEVSPPVGAGVNSNSWTFKYGPGNPKQSGPGELPDKFIIPGSPAIISIRQEPTNSQIDKSDFITFGKKEETKKKKKKKKGNKTQEKKEKGNSTTDNSDQ

SEQ ID NO: 505 - DNA, 14239 bp, Homo sapiens
  CDS (1553)..(5920)
tgcaacggaaacttttggctccacgaacagaaaagcaagagcaaaaactcagttaaatgcgttcttcctccatctttgcctagtccaaaaggaaaaaaaaagaaacagaaaaaagaaaaactgtttggaagagtagcgttgaggtttgctttttacctgtttttcctctagaacagccaggtggattcacatgatccaattttttaattgtcttctatgtcccactccgaataacccggatgccccagcacaatcagagagatcgttttttttaaaaaaaatttcagcctccaaaggtaggaggggagtgttaggggagaaagtactttaattaaaaatcaataactcgaggtttttgggatacggtttgccatttcctaattaagaaatgggtttgacagtccctttgtacacactgctatgcaaaccccaaagggttggcggctgtccgggcgatgacactccggtcccctgcgagaccccgggccagccaggcccgtccgccgccggcctctggggtccgtccccggctcgcgcagacctctcgcttctctcggctctgtctcctgcgctcagctctgctcggggccggccgcctcaggctcgccgccaccaggtcgttgcaaataccttttccctccccggggccccagcgcgcggccacctcccagcctccccccctcccaccctggcagcggggccctttcccggctcaggaacagcagcagcccgggccgcgccggcaggaagcgaggcccatgttgctgctgttccctggcgcgcctccccgccctccgggggccgccacggctcttccgcgctcccgggcacccccctccgcgcctgcgctgtgccccacgggggcggggctcagattcctgtcagcggcggcggcggtggcggcgaccgtcagttttcgctgaggagaaacacgaaacggaccctttggctctcccccttccccttccccgtcctgaacccctctcctggtcaccgagaatcagtccccgtggagttccccctccacctcgccatcgtttcctcggtcctcggcccagtggaagtcactaccctcgaggaggaggcagcggcagccgccctcgcgtcgccgcccccggttcggtgcccgcggtcccggagaggaggtgccgccgccaccgccgctccccccctcccgctgccctcgggccgggctgggtcgagctgcgatgccctcggacttcatctcattgctcagcgcggacctagacctggaatcgcccaagtccctctactcgcgagattctctgaagttacacccatcacagaattttcatagagctggactattggaagaatctgtctatgatcttctcccaaaggagttacagttacctccatctagagaaacatctgtagcatcaatgagtcagacaagcggtggtgaggcaggctcgcctcctccagctgttgttgctgctggatttgcctctgaagcagggagtgtctgcattaaaaatgacctgtagttctctgcttcatagatgcttcttcagctccctcctcttcctccatgggcggtgcttgcagctcctttaccacctcttccagccctaccatttattctacctcagtcaccgacagcaaggctatgcaagtggagagctgctcctcagccgtgggggtaagtaacagaggggtaagtgaaaagcagttaaccagtaacacagttcagcagcatccatcaacaccgaagaggcacacagtcttgtacatctcaccaccacctgaggacttgctggataacagtcggatgtcctgccaggatgaggggtgtggattggaatctgagcagagctgcagtatgtggatggaggattccccctccaacttcagtaacatgagcaccagttcctacaatgataacactgaggtacctcgtaaatcacgaaaacgaaatccaaagcagaggccgggggtcaaacgacgagattgtgaagaatctaatatggatatatttgatgccgacagtgccaaagcacctcactatgtgctttctcagcttaccacggacaacaaaggcaactcaaaagcgggaaatggaacattggaaaaccaaaaaggaactggagtaaagaagagccctatgttgtgtggacaatatcctgttaaaagtgagggaaaggagctgaagatagttgtacaacctgagacacagcaccgagctcggtacctgactgagggcagccgtggctcagtgaaagatagaacacagcaaggctttcctacagtaaagctggaaggccataatgaacctgtagtgttgcaagtgtttgtgggcaacgactctggacgagtgaaaccacatggattttatcaggcctgcagagtaactggacgaaatacaactccttgcaaagaagtggacattgaaggcactactgttatagaagtcggccttgatcctagcaacaacatgacactggcggtggactgcgtagggatattgaaattgaggaatgctgatgtcgaagccagaataggaattgctggttccaagaagaaaagcactcgtgccagattggtttttcgagttaatatcatgaggaaagatggctccactttgacactgcaaacaccctcttctccaattttgtgtactcagccagcaggagtgccagaaatcttaaagaaaagcttgcatagctgttcagtgaaaggagaagaagaagtgtttttaatcggcaagaactttctgaaaggaactaaagttattttccaagaaaatgtttctgatgaaaactcttggaagtcagaagctgaaattgatatggaactatttcatcagaatcatcttattgtgaaggttcctccctatcatgaccaacatataactttgcctgtgtcagtgggaatatatgtagtgacaaatgctggaagatctcatgatgttcaaccattcacttacactccagacccagcagcagctggtgctttgaatgtaaatgtgaagaaggaaatatctagtccagcaagaccttgctcttttgaagaggccatgaaagcaatgaaaactactggatgtaatttagataaggtaaatattatccctaatgccctgatgactccactcataccaagcagtatgattaagagtgaagatgttactccaatggaagtaacagcagaaaaaagatcttccactatttttaagactacaaagtctgttggatcaactcagcaaacattagaaaacatctcaaacatagcaggaaatggctctttttcatcaccatcatcttcccacctaccttctgaaaatgaaaaacagcagcagattcagcccaaggcatacaacccagagaccctgacaactattcaaacccaggacatctcacagcctggtacttttccagcagtttctgcttctagtcagctgcccaacagcgatgcactattgcagcaggctacacagtttcagacaagagaaactcagtctagagagatattacagtcagatggtacagtggttaatttgtcacaactgactgaggcatcacaacaacagcagcagtcaccactacaagaacaagcacagactttacagcagcagatttcatcaaatatttttccatcaccaaatagtgtgagtcagcttcagaatactattcagcagctgcaagcagggagtttcacaggcagtactgctagtggcagcagtggaagtgttgacttggtccaacaagttttagaggcacagcagcagttatcttcagttttattttctgctccagatggtaatgagaatgttcaagagcagcttagtgcagatatttttcaacaagtcagtcaaattcagagtggtgtaagccctggaatgttttcctcaacagagccaacagtccataccagaccagataatttattacctggaagagctgaaagtgttcatccacagtctgaaaacacgttatctaatcaacagcagcagcagcagcagcaacagcaagtgatggaatcttcagccgcaatggtgatggagatgcaacagagtatctgccaggcagctgcccagattcagtcagagttattcccttcaactgcttcagcaaatggaaaccttcagcaatcgccagtttaccagcagacttctcacatgatgagtgcattgtctaccaatgaggatatgcaaatgcagtgtgaattgttttcttctcctcctgcagtttctggaaatgaaacttctacaactaccacacagcaggttgcaacccctggcactaccatgtttcagacatcaagttcaggagatggagaagaaactggaacacaagcaaaacagattcagaacagtgtctttcagaccatggtccaaatgcaacatagtggggacaatcaacctcaagttaaccttttttcatccacaaaaagtatgatgagtgttcagaatagtggtacccaacaacaaggtaatggtttattccagcaagggaatgagatgatgtcacttcaatctggaaattttttgcagcagtcttctcattcacaggcccaactttttcatcctcaaaatcctattgccgatgctcagaacctttcccaggaaactcaaggttctctctttcatagtccaaatcctattgtccacagtcagacttctacaacctcctctgaacaaatgcagcctccaatgtttcactctcaaagtaccattgctgtgttacagggctcttcagttcctcaagaccagcagtcaaccaacatatttctttcccagagtcccatgaataatcttcagactaacacagtagcccaagaagcattttttgcagcaccgaactcaatttctccacttcagtcaacatcaaacagtgaacaacaagctgctttccaacagcaagctccaatatcacacatccagactcctatgctttcccaagaacaggcacaacccccgcagcagggtttatttcagcctcaggtggccctgggctcccttccacctaatccaatgcctcaaagccaacaaggaaccatgttccagtcacagcactcaatagttgccatgcagagtaactctccatcccaggaacagcagcagcagcagcaacagcagcagcaacagcagcagcaacaacaacagagcattttattcagtaatcagaataccatggctacaatggcgtctccaaagcaaccaccaccaaacatgatattcaacccaaatcaaaatccaatggctaatcaggagcaacagaaccagtcaatttttcaccaacaaagtaacatggccccaatgaatcaagagcaacagcccatgcaatttcagagtcagtccacagtttcctcacttcagaacccaggtcctacccagtcggaatcatcacagacccccttgttccatagctctcctcagattcagttggtacaagggtcacctagttctcaagagcagcaagtaactctcttcttatctccagcatccatgtctgccttgcagaccagtataaatcaacaagatatgcaacagtctcctctttattcccctcagaacaacatgcctggaattcaaggagccacatcttcgcctcaaccacaggctactttatttcacaacacagcaggaggcacaatgaaccaactgcagaattctcctggctcatctcagcagacatcaggaatgttcttatttggcattcaaaataactgtagtcagcttttaacctctggaccagctacattgcctgatcagttgatggccataagtcagccaggccaaccacaaaacgagggccagccacctgtgacaacacttctttctcagcaaatgccagagaattctccactggcatcctctataaacaccaaccagaacatcgaaaagattgatttgcttgtttcattgcaaaaccaagggaacaacttgactggctccttttaactggatataaattccacgaagaaaatcctgattccaagatgtcctgagatcttgtggttccatgagaattattactttaaaaacaaaacaaaatataaaaaactgtgtttgagtaaactgatagattttactctgactgcaaaagagcacacctatgctgcttgttgcagtaactaaccaccaatgttaacatcttcatattttatattcctaataacagtgatgactgagaatctatttgagtttccagctggcagaattaattgttattattttcctaggcgcaatttccttaaacgtacagtttaaattcaaggctggaccactcagttattattgctattagaaaataatatatcatgtttacttttgttcttcattattttctttcctgcattgttttagtcaagtaatggcttttgaaaaagtaaagttcaataataactaaggctgtgatttttttcaatataaaaggcacagctgttggccaaagtgaaggaatcttttttcagttttattggagaaactgaagggtaacattctaacaagtaaactgtatgtgcagataaaagtactcttgatttaacacaaaggcagatgatacacttataaaactgggaacagctggaatgcttcttgattttattttttcagagagttgttagttctctgggtttctactaaggggtttagccataactgtgcatagaaaaataattatctgtaaaaaatgaaggggataatatatgataaattatgttctgatatcctcctacagtagtttaaattgacagaaaaatttgaatgttttcttcttaacccagtcttaggctggtattccctttttatatatatctatattacttttcacctctttttcactttactttagagaactattaatatactactggcttcatgaccctgtagcatctttggccactttaatctagggtgacctagcaatcctgcagcacagggcagagagtactgtcttaggaattattaggagttgattcctgagaaacaacacatttttccccatgaacggtgctgttctgaagtcttcaaatttttccctctaataggaaacagtataaattttaattaaaaaaaaaaggcaaactaaaatttcttgaaatatcacttctccctgatctgcagtgagtataaattcacttgtcacctcagtgctttacagtttgaagtggtcacttacctgatggttcccacaagccttaggctttacagggttgtatcattgacttaaaatgaagaattaacttgtgttacatctataaagagcaaaataacacactccagaacttggcagttgtagcattagttatacagttttgggtgttcttgccacccgtgggatgcctgcttctcactaccacctgtgtctggacacatgcttatgtctcattttccttttggcatgtggaaagctgtcaatgcagtgtaaggccaacgtgtgtgtggcttctatgtgttgagataatgttttggtatccttgtccgtttcatttattttttaagtgtacaaaaaataacctgttaattgttgaaggctacttttctgttctttttttttttttttttctatcctgtacatttagttgaactgtgcggaattgtggtgttggttttgtttacacagccagatttttccttctttttgttttgtgatgatcttcctttgttctttgaatgtgctcttttgtctttttctcttttttctcatgttttcttccctccacctccacccctttctttctttctctctctgattgagaggcattgaattacgttttcagtagtacaggcttcttgccgatatgaagggaacttttcagaaagagacctactctgggtcatttaattttgaatacagttttcaatcgttcaagttttggatggtttatatctaatgtgtgtttcatttttttggaaagctatattttgtatttaggaaatggtatactattttgctatttgtactgagtgagtacattggcataaatatagaaatttatatatatacatatatataaactattcttttttgccacacatttttgtggtaaatttgtgagtttgtctgatgttctaccacaacgtggcgtctgataacagtgagggggggtggggtttgttatgtctttattgagtatttaagtatcttttgaaacaaatgacctgttcatctgtggccattccatcaggcagttagttccttgatgtcagtagtgggctaaaggcagcttactgtgtgtttgctggagctttcactcagccaagtgttagagtcaggaaacccattgaggcaatggcgtcaaatggtgtttcacaagaatgagccattcagtctttgctcactatatatttaatattttattattgttgttattgttattattaattggctttctgtattctatgccttttatttataaagacactaagaaaacccatgtttgtaattttaataacatttttcccatcttgtaatatccagagctactttataaattctctgaaccaaaagtattttcctcagtgtatctcttctcccccagcccctattgggaaaaattacccagtatagttcaggttatgaggaggatcagccacacaatccagtgcttcagtttgaaaatgtaaaattctaaccctaaagtagggttggttgaaatttcagacaaagcaaacccagcaggtataaaaagtagtataaatacaaatctgtaagttatttttgaattttctgaacttttttctaagagattacataggagactaaagaaatctatctgttcaagttctaattaggatgattgttaatactgcactgtggatgaagtggcgactggcttgtgtgctgacttctgtggtttagcaagaggtttattgttatcaaatgctaattggcaatgccaagtcactgggaccaattttctgttttataatatctaagtttagaacagaatatatacctgaactgtagtggtttgatcggatggagacagaaaacccgatttttattctcataaattttgtggttatttatacaagggctgtgctatgctaccatattcttgttcaataataataggtttgttgttttttttacattgttaaatgttccttacccctaaaggtcaatgttaagtacaacattctgaaaatacaatttggctacgaagagtattcatcttctttgaagctcagtggttgatatttgtgctaataatgcaatttcctgattactgttacaagttatagctacatatgggagagactcagtgagccagcaaaggccatagaaacaacaatttattaaatgtatttatggcagaaggacctaaataaactgtgagccaccttttcttctttatattgttacatttaagtgttcttgctttcagcaactcacattaatgcttggagcttatctctttctctctctctctctctctctctgtgtgtgtgtgtgtatgtgtgtgtgtgtgtgtgtgtgtttccttattgtcattccattatatatccacaccaacatgggtgacgataattcaaagtcatattttgcctctaagcttgatcatgttacctttatgattaaagtatcatgttatttagccaatgcaaatctgttttaaaacaaatagtttaaaaaaagaacaagtttttaagggctttattatagaagaagtattaatgaaggactttccttcctccctccctttcctcccctccctgcctcccttcttcccttccatctccccctcctccctgccttctttgtttctccttcccttattcctccctccctcctttctcccttccttcctttcttccattcatccttccttgccttttatttttattttttgtaatatcacatgtgctgtagtttggaattttattctagtgcatttcttgctcatcagaacctcagctaatctacctaggaaaaatagtatcaaaggaaatgagaaagttgtatctgagtccctccagaactaagataattctttttgaccatttaagcctttataaatgcgttttgaccatttaagcctttataaatgcttgttttaggaaagtgaatctgttagatgcatcaacaaataatgaccaggacaaaacgatttaataattaaagtctcaaatcaccatggttatacattttcaccagaaatagtaatcttacaatttttcatttttctgatgaagatttctgttccaatatctgtttcctaatagattttttaaattaattagctttcctctgctttatgaccacaggttttatccctaaccgagacagctgtcttatatctgcatgccttagactgtgtggagggactccatgaagaaagaccataggttagaaaaataactcatagtatataccctagtaagtgggttagtagaatctcataacatgtattaaaaagaggttttcttctctgcttgtttgtgtcactagagcaaaattgtagagataatgctcataatgcagtaaatatcagaataatatctacaatatcatttgtggatggtcccaggtcccagtgctctagttactttacttctttttttttttttgagatggagtcttgctctgtctctcaggctagagcagtgtgcgatctcagctcactgcagcctccacctcccaggttcaagcgattctcctgcctcagcctcccaagtagccaggattacaggcaccctccactaggcccggctaattttttttgtatttttttagtagagatggggttttgccatgttggccaggctggtttcgaactcctaacctccagtgatccacctgcctcggcgtcccaaagtgctaggattacaggcatgagccaccacatccggcctaattacttctttaatccccatttatttttatgccattctagcctcatttattaataaaattatgtttttactttctctttcaggaaattttttaaattaatattttatatctagatctaatgctatggaaaagtgcctttttatcatttataatttcatttttcactatttccaaaaacacataaacaaatagtttcagtaggtcccagcttttactttttccatttaaaccttcttttctccatttcttccctttggcttaagaataaaagaaaaggtacattgctagaattgtttctttgggagagggtaaaagattacagaattagactgttcagcctttatataaactaaatttgtcttcatctcaaccagctaatggtaggtcttatctgaatactcatgagaattttagcatctgtgaaactccatgcaccagatgtgtgtaaatttcaggaagaaagtgttgaaagcattttctctgatgttaattagatggaaataaatcactaaaacatagtttaggtaaagcctgattatgccacttttttttaactagacagggcaaagttgtttatgttagtgtacttcttgtctatcctcagttaatttacctagacaaaaagtgtcaaaggaaatgagaaaaaggttatatctgactccctccagacctaagataattccttttgatcagatacagtcagatggagtgccttggtttttgttaattttgcctctattccagctccttaccacagcggtggtgcttaaagaaaggatcatcagcaacaggtcaggatagttctacctttgggatagggctgctttccccgtgctagtatttctgtgactgttagtggcactgaggactgcaaacttttatgcaatattcttaataccctattgatattatgcactttaatcattccaaagaagccaagaatgctgtatagtgatgattccttcctaatgaattcatcttaactatttagaatgttatgtcccttttcttttggatagccaacttggtataaatgttatatggatttttctaaaatgactatataggacttaagactttgaaatgtaatttacttataaggggaaataattatgctttagcacatcattttagaaacgtcacattttagaaacattcagcttgctaacctacatgtttgggaattcattaaaaccagttgtctatatattttgtgccatgtatataagaacattacaatatatctttttctacatatgtagtatgtgcaaccagtggttctcagagtatggttctcagcccaccagctagtatcagtatcacctgggaactagttagaaatgtaaattctttggccccatcccagacatactgagtcagaaactctggaatagggcccccgcaatctgttttcacaagccctccaggtgattctgatgcacactttaaagtttaggaaccactgggctaagactctgttgagatatagagtttttcttccactcagactgatatagttatacattgttcttcatgtaaattcagcttaacctggttatctataatcttttattggcaaaagttaattctcagtactgcctatagagatacagtgtattttatgtacatacacaattagtctaattcttgataattcagttaatttagtttggcattttcctaccacttactaaaaggtttacattaaatgactgatttaaatatataggtgcaatgttctatgtttattttaattgttatgacatttaagtagctaatataattgaccggtgctaaagtctcctgtttatccataaaatgggtacattatgggcagtgtaatacaagctttcttttcattgcctagtactttaccagcagaccacagttttgccctggctagaccaaccctcagaacaaaatcatcattccttgtatttatatttgtatctgagatagtaaacaagatggctggccaggtcaacatggcaccttaacttatttttttaataggtaaaacttcttcaaaagtagcttgctttgtataagaactaagctatcagtatagatatagctatccttggagcttatgtttcagacaagaattatttactaaaataaataataaacaagataatgcattatacaatttgggcatttctcgtttctcaagtgtatgcatcatggtaaatataaactaaccacaagataggtagattgattcatttcattttaatctccttgtgtaattcagtacctccataattgttctaatcttcttcccactgtttacaaattaccagttaattaactcgtgaaagaaaaattcacatatcagaataaaaataaatgtatactcactttataaaaatcaccactgctgtctttccttaatactagcagtggaaatgtaagtggcttactctacaaattttggtgctggcaaatacataggcaaactgttgggagctgctctagttacattcctcccttcttattccctttttctcttcctcactttattgcataacatattcctgtacccaaagcattctaccacagttctatttgactcccacttgtaataactcctttaaaaaattccatgtttaaccatatgaccctgcttgcttactcatattctccctccctctccccttcctttctctctcttccagaagtcatttgcctggtttgaaatattttgtagggattgcttattatattattttagctgatgaacctcaggacaacgtctacacacacacacatacatacacgcacacaaaatctcagctgttgaagagtgggcttggaatcagacttctgtgtccagtaaaaaactcctgcactgaagtcattgtgacttgagtagttacagactgattccagtgaacttgatctaatttcttttgatctaatgaatgtgtctgcttaccttgtttccttttaattgataagctccaagtagttgctaattttttgacaactttaaatgagtttcattcacttcttttacttaatgttttaagtatagtaccaataatttcattaacctgttctcaagtggtttagctaccattctgccatttttaatttttatttaattttatttgcttgagcacactgatcaaccactgaactgccttcttccattgtcctgcaatgatataagggttacatttttgtgtatatggctttcatagttgggatttcagagcactgataccagatattttcagtttgttctctgggggaatttcatttgcatctatgtttttagctatctgtgataacttgttaaatattaaaaagatattttgcttctattggaacatttgtatactcgcaactatatttctgtaaacagctgcagtcaaaaataaaacactgaaagttaaaaaaaaaaaaaaaaaaaa

SEQ ID NO: 506 - protein, 1455 aa, Homo sapiens
MGGACSSFTTSSSPTIYSTSVTDSKAMQVESCSSAVGVSNRGVSEKQLTSNTVQQHPSTPKRHTVLYISPPPEDLLDNSRMSCQDEGCGLESEQSCSMWMEDSPSNFSNMSTSSYNDNTEVPRKSRKRNPKQRPGVKRRDCEESNMDIFDADSAKAPHYVLSQLTTDNKGNSKAGNGTLENQKGTGVKKSPMLCGQYPVKSEGKELKIVVQPETQHRARYLTEGSRGSVKDRTQQGFPTVKLEGHNEPVVLQVFVGNDSGRVKPHGFYQACRVTGRNTTPCKEVDIEGTTVIEVGLDPSNNMTLAVDCVGILKLRNADVEARIGIAGSKKKSTRARLVFRVNIMRKDGSTLTLQTPSSPILCTQPAGVPEILKKSLHSCSVKGEEEVFLIGKNFLKGTKVIFQENVSDENSWKSEAEIDMELFHQNHLIVKVPPYHDQHITLPVSVGIYVVTNAGRSHDVQPFTYTPDPAAAGALNVNVKKEISSPARPCSFEEAMKAMKTTGCNLDKVNIIPNALMTPLIPSSMIKSEDVTPMEVTAEKRSSTIFKTTKSVGSTQQTLENISNIAGNGSFSSPSSSHLPSENEKQQQIQPKAYNPETLTTIQTQDISQPGTFPAVSASSQLPNSDALLQQATQFQTRETQSREILQSDGTVVNLSQLTEASQQQQQSPLQEQAQTLQQQISSNIFPSPNSVSQLQNTIQQLQAGSFTGSTASGSSGSVDLVQQVLEAQQQLSSVLFSAPDGNENVQEQLSADIFQQVSQIQSGVSPGMFSSTEPTVHTRPDNLLPGRAESVHPQSENTLSNQQQQQQQQQQVMESSAAMVMEMQQSICQAAAQIQSELFPSTASANGNLQQSPVYQQTSHMMSALSTNEDMQMQCELFSSPPAVSGNETSTTTTQQVATPGTTMFQTSSSGDGEETGTQAKQIQNSVFQTMVQMQHSGDNQPQVNLFSSTKSMMSVQNSGTQQQGNGLFQQGNEMMSLQSGNFLQQSSHSQAQLFHPQNPIADAQNLSQETQGSLFHSPNPIVHSQTSTTSSEQMQPPMFHSQSTIAVLQGSSVPQDQQSTNIFLSQSPMNNLQTNTVAQEAFFAAPNSISPLQSTSNSEQQAAFQQQAPISHIQTPMLSQEQAQPPQQGLFQPQVALGSLPPNPMPQSQQGTMFQSQHSIVAMQSNSPSQEQQQQQQQQQQQQQQQQQSILFSNQNTMATMASPKQPPPNMIFNPNQNPMANQEQQNQSIFHQQSNMAPMNQEQQPMQFQSQSTVSSLQNPGPTQSESSQTPLFHSSPQIQLVQGSPSSQEQQVTLFLSPASMSALQTSINQQDMQQSPLYSPQNNMPGIQGATSSPQPQATLFHNTAGGTMNQLQNSPGSSQQTSGMFLFGIQNNCSQLLTSGPATLPDQLMAISQPGQPQNEGQPPVTTLLSQQMPENSPLASSINTNQNIEKIDLLVSLQNQGNNLTGSF

SEQ ID NO: 507 - DNA, 1964 bp, Homo sapiens
  CDS (24)..(1601)
atagcaagggatggtttaacaaaatgaaggcactcattgcagcactgcttttgatcacattgcagtattcgtgtgccgtgagtcccactgactgcagtgctgttgagccggaggctgagaaagctctagacctgatcaataaaaggcgacgggatggctaccttttccaattgctgcggattgctgatgcccacttggacagagtggaaaatacaactgtatattacttagtcttagatgtgcaagaatcggactgttcggtcctatccaggaaatactggaatgactgtgagccacctgattccagacgtccatctgaaatagtgatcggacaatgtaaggtaatagctacaagacattcccatgaatctcaggacctcagagtgattgactttaactgcaccacaagttctgtctcttcagcactggccaataccaaagatagtccggtcctcatagatttctttgaggatactgagcgctacagaaaacaagccaacaaagcccttgagaagtacaaagaggagaatgatgactttgcctctttcagagtggaccgaatcgagagagttgcaagagtgagaggaggggaaggaactggttacttcgtggacttctctgtgcggaactgccccagacaccatttccccagacaccccaatgtctttggattctgcagagcagatttgttctatgatgtagaagccttggacttggaaagcccgaaaaaccttgtcataaactgtgaagtcttcgaccctcaggaacatgagaacatcaatggtgtaccgcctcatttgggacatcccttccactggggtgggcatgagcgttcttctaccaccaagcctccattcaagccccatggatctagagatcatcatcatccccacaagccacacgaacatggacccccacctcctccagatgaaagagatcactcacatggacccccacttccacaaggccctcctccactattgcccatgtcctgctcaagttgtcaacatgccacttttggcacaaatggggcccaaagacattctcataataataattccagtgacctccatccccataagcatcattcccatgaacagcatccccacggacaccatccccatgcacaccatcctcatgaacatgatacccatagacagcatccccatggacaccacccccatggacaccatcctcatggacaccacccccatggacaccatccccatggacaccatccccactgccatgatttccaagactatggaccttgtgacccaccaccccataaccaaggtcactgttgccatggccacggcccaccacctgggcacttaagaaggcgaggcccaggtaaaggaccccgtcccttccattgcagacaaattggatctgtgtaccgactccctcctctaagaaaaggtgaggtgctgccacttcctgaggccaattttcccagcttcccattgccgcaccacaaacatcctctaaagccagacaatcagccctttcctcaatcagtctctgaatcatgtccagggaagttcaagagtgggtttccacaagtttccatgttttttacacatacatttccaaaataaaatgtgattcctttgaagaggaaaatgaataatacattgaattagaaacataaataaaatgaccagtaattgtgaaaattacagttcttttcaacctactttcatactgaagatgcagcaaaatgtgaatgggaaaagagatggcctgagaagagagatcaaatggaaaggagaggaaagaactcagtgctgcctattagtagttaattctgtcactcaccactacatcacttgagacaaatctatgccactcagaatctccttctttcctggacttaactctaattctagagtctctgttactgcttgggctatacctgggcatactaataaagtatggtattgaaactaaaaaaaaaaaaa

SEQ ID NO: 508 - protein, 525 aa, Homo sapiens
MKALIAALLLITLQYSCAVSPTDCSAVEPEAEKALDLINKRRRDGYLFQLLRIADAHLDRVENTTVYYLVLDVQESDCSVLSRKYWNDCEPPDSRRPSEIVIGQCKVIATRHSHESQDLRVIDFNCTTSSVSSALANTKDSPVLIDFFEDTERYRKQANKALEKYKEENDDFASFRVDRIERVARVRGGEGTGYFVDFSVRNCPRHHFPRHPNVFGFCRADLFYDVEALDLESPKNLVINCEVFDPQEHENINGVPPHLGHPFHWGGHERSSTTKPPFKPHGSRDHHHPHKPHEHGPPPPPDERDHSHGPPLPQGPPPLLPMSCSSCQHATFGTNGAQRHSHNNNSSDLHPHKHHSHEQHPHGHHPHAHHPHEHDTHRQHPHGHHPHGHHPHGHHPHGHHPHGHHPHCHDFQDYGPCDPPPHNQGHCCHGHGPPPGHLRRRGPGKGPRPFHCRQIGSVYRLPPLRKGEVLPLPEANFPSFPLPHHKHPLKPDNQPFPQSVSESCPGKFKSGFPQVSMFFTHTFPK

SEQ ID NO: 509 - DNA, 7042 bp, Homo sapiens
  CDS (396)..(6284)
caacgtgctgagctaatagcgacagatagagggcagacagattcctgctagcagcttagtgttagttgcttgtggtaactaaggcaggtggcatacatctcagaacgtggagaatgatggtatgctttctgagttaacatgttgaactgttttgcttttctaaaaattttcctagtaacattttcttgatgatatgagagtggatatcaatgcctcacagaaacaagaggtggaacatgtgaatgaatcgtcttggaactagattatgagcactggttctttttaaagggatgtgcaagaggcagccttggcaagaaaacttgctgcataatcttacatggactaaagatgaaactttaaaccgcaaatcagctttgagtgaactttgacagaagatgtttcgacagttttatctctggacatgtttagcttcagggatcatcctgggctctctctttgaaatctgcttgggccagtatgatgatgactggcaatatgaggattgcaaactagctaggggaggaccaccagctaccatagttgctattgatgaagaaagtcggaatggtacaattctggtggacaacatgctgatcaaagggactgctggaggaccagaccccaccatagaactttctttaaaggataatgtggattactgggtgttgatggatcctgttaagcaaatgcttttcctgaacagcaccggaagagttctggatagagatccaccgatgaacatacactccattgtggtgcaggtccagtgcatcaacaaaaaagtgggcactattatctaccatgaagtgcgaatagtggtgagagacaggaatgacaactcacccactttcaagcatgaaagctactatgccacagtgaatgagctcactccagttggtaccacaatattcacaggattttcaggagacaatggagctacagatatagatgatggaccaaatggacagatagagtatgttattcagtataatccagatgatccgacatccaatgacacctttgaaattcccctaatgttgactggaaatatagtgttaaggaagaggctcaactatgaagataagactcgctactttgtcataatccaagctaatgaccgtgcccaaaatctgaatgagaggcgaaccaccaccaccactctcacagtggatgttctggatggagatgacttgggtccaatgtttcttccttgtgtccttgtgccaaacactcgtgattgccgtccactcacttatcaagctgccatacctgagttgagaactccggaagaactgaaccccattattgttacgccaccaatccaagccattgatcaggaccggaatattcaaccgccatcagataggccaggaatcctctattccatccttgttgggactcctgaggattacccacgatttttccatatgcatcctaggacagcagaacttagtctcctggagccagtaaacagagactttcaccagaaatttgatttggttattaaggctgaacaagacaatggtcatcctcttcctgcctttgccggtctacacattgaaatactggatgaaaacaatcaaagtccatattttacaatgcccagttatcaaggctatatcctggaatctgccccagtgggagcaaccatttcggacagtctcaatttgacttcacctttaagaatagtagctctggacaaggacatagaagatacaaaagacccagagcttcacctttttctgaatgactacacctcagtcttcaccgtcacacagactggtattactcgctacctcaccttacttcaaccagtggacagggaagaacagcaaacttacaccttttcgataacagcatttgatggtgtacaagaaagtgagccagtcatcgtcaatattcaagtgatggatgcaaatgataacacgccaaccttccctgaaatatcctatgatgtgtatgtttatacagacatgagacctggggacagtgtcatacagctcactgcagtcgacgcagacgaagggtcaaatggggagatcacatatgaaatccttgttggggctcagggagacttcatcatcaataaaacaacagggcttatcaccatcgctccaggggtggaaatgatagtcgggcggacttacgcactcacggtccaagcagcggataatgctcctcctgcagagcgaaggaactccatctgcactgtgtatattgaagtgcttccaccaaataatcaaagccctcctcgcttcccacagctgatgtatagccttgaaattagtgaagccatgagggttggtgctgttttattaaatctacaggcaactgatcgagagggagactcaataacatatgccattgagaatggagatcctcagagagtttttaatctttcagaaaccacggggattctaaccttagggaaagcactggacagggaaagcactgatcgctacattctgatcatcacagcttcagatggcaggccagatgggacctcaactgccacagtaaacatagtggtgacagatgtcaatgacaatgctccagtgtttgatccttatctgccaagaaatttatctgtggtggaagaagaagccaatgcctttgtgggtcaagtaaaagcaacagaccctgatgctggaataaatggtcaagtgcactacagtttgggtaactttaataatctttttcgtatcacatccaatgggagcatttacacagcagtgaagcttaacagagaagtcagggactactatgaacttgttgttgtggcaacagatggagcagtacaccctcgtcattcaactctaaccttggccatcaaggttttggacattgatgataacagtcctgtgttcaccaattcaacatacactgtccttgttgaagagaatttgccagctgggactaccatccttcaaatagaggccaaagatgtcgaccttggagcaaatgtgtcttaccggataagaagcccagaagtgaagcacttttttgcactacatccatttacaggagaactatcgcttttaaggagtttagattatgaggcatttccagaccaagaagcaagtatcacttttctggtagaggcctttgatatttatggaacaatgccacctggtattgctactgtcacagtgattgtaaaggatatgaatgattatcctcctgtctttagtaaacgaatatacaaagggatggtggctccggatgcagtcaagggtacacctatcacaacagtttatgctgaagatgcagaccctcctggattacctgcaagtcgtgtgaggtatagagtagatgatgtacagtttccttaccctgccagtatttttgaagtggaagaagattctggaagagtaataacacgagtcaatcttaatgaagaacctacaacaatttttaagttggtggtggttgcttttgatgatggggagcctgtgatgtccagcagtgccacagtgaagattcttgtcttacatcctggtgagatcccacgcttcacacaggaggaatatagacctcctccagtaagtgaacttgccaccaaagggaccatggttggtgtaatttctgctgctgccattaatcaaagtattgtgtactccattgtttcaggaaatgaagaagatacatttggaattaataacatcacaggtgttatctatgtgaatggacctctggattatgagaccaggacaagctatgtacttcgagtccaagctgattccctggaagtggtccttgccaatctccgagttccttcaaaaagcaatacagctaaagtatacattgagattcaggatgaaaataatcatcccccagtgtttcagaaaaaattctacatcggaggtgtatctgaagatgcaagaatgtttacttctgtactcagagtgaaggctactgataaagatactggcaattatagtgtcatggcctacagactcataataccaccaattaaagagggaaaagaaggatttgtagtggaaacatatacagggcttatcaaaactgctatgctcttccataatatgaggagatcctacttcaagtttcaagttattgcaactgacgactatgggaagggactgagcggcaaagccgatgtactcgtctccgtggtcaatcagctggatatgcaagtcattgtttccaatgtgcctcctactctagtggaaaaaaagatagaagatcttacagagatcttggatcgctatgttcaggaacaaattcctggtgccaaggtcgtagtggagtccattggagctcgccggcatggagatgccttttccctagaagattacaccaaatgtgacttgactgtctatgcaattgacccccaaaccaacagagccatcgatagaaatgagctttttaaatttttggatggcaaactacttgatatcaataaagactttcagccgtattatggggaaggaggacgcattctggagatccggactccagaggcagtgaccagcattaaaaagagaggagaaagtctaggatacacagaaggggccttgttggctctggccttcatcatcatcctctgctgcattcctgccatcttggtggttttggtcagctacagacagtttaaagtacgtcaagctgagtgtacaaagactgcacgaattcaggccgcattacccgcggctaaaccagcagtgccggctcctgcaccagtggcagcgcccccgccgccgccgccgcctccgccaggtgcgcatctctatgaagaacttggagacagctcaatgcataatcttttccttctctaccattttcaacaaagcaggggaaataactcagtctcagaagacaggaaacatcaacaagttgtgatgcccttttcttccaatactattgaggctcacaagtcagctcatgtagacggatcacttaagagcaacaaactgaagtctgcaagaaaattcacatttctatctgatgaggatgacttaagtgcccataatcccctttataaggaaaacataagtcaagtatcaacaaattcagacatttcacagagaacagattttgtagacccattttcacccaaaatacaagccaagagtaagtctctgaggggcccaagagaaaagattcagaggctgtggagtcagtcagtcagcttacccaggaggctgatgaggaaagttccaaatagaccagagatcatagatctgcagcagtggcaaggcaccaggcagaaagctgaaaatgaaaacactggaatctgtacaaacaaaagaggtagcagcaatccattgcttacaactgaagaggcaaatttgacagagaaagaggaaataaggcaaggtgaaacactgatgatagaaggaacagaacagttgaaatctctctcttcagactcttcattttgctttcccaggcctcacttctcattctccactttgccaactgtttcaagaactgtggaactcaaatcagaacctaatgtcatcagttctcctgctgagtgttccttggaactttctccttcaaggccttgtgttttacattcttcactctctaggagagagacacctatttgtatgttacctattgaaaccgaaagaaatatttttgaaaattttgcccatccaccaaacatctctccttctgcctgtccccttccccctcctcctcctatttctcctccttctcctcctcctgctcctgctcctcttgctcctcctcctgacatttctcctttttctcttttttgtcctcctccctctcctccttctatccctcttcctcttcctcctcctacattttttccactttccgtttcaacgtctggtcccccaacaccacctcttctacctccatttccaactcctcttcctccaccacctccttctattccttgccctccacctccttcagcttcatttctgtccacagagtgtgtctgtataacaggtgttaaatgcacgaccaacttgatgcctgccgagaaaattaagtcctctatgacacagctatcaacaacgacagtgtgtaaaacagaccctcagagagaaccaaaaggcatcctcagacacgttaaaaacttagcagaacttgaaaaatcagtagctaacatgtacagtcaaatagaaaaaaactatctacgcacaaatgtttcagaacttcaaactatgtgcccttcagaagtaacaaatatggaaatcacatctgaacaaaacaaggggagtttgaacaatattgtcgagggaactgaaaaacaatctcacagtcaatctacttcactgtaatgttgcttttcttattttagtcgggcaaacctcttgttgatcatagtcttcaagttgaacatcaaatttgaacgtcaaagaagactctattattttaccccaaattcaatgaaatgcagttttttttctcgtttttaatttaaaaagatattaacctcatcactactaactcactcatataatagatttaccttactttttaaaaactacaaagtagcataatttgttctacatttatttgaaaagtaagtaattttaatctcttttttagtgggaatatgtgggcatgaaaattagatacccaacttaaaccaaaggcatgtctatcatgtggatgcagtaacatttacatttagtttttgatcgtagttttatatgaatgttccaagaaaaaagcagactgttacaaataagttaaaactgatatgattgataggttctgttttttcttgaagcctatgtatttggtaagaagaaatactaccgaagtaaaatataatgtacctagattgtaggagatgacagacataaggtatttcaaaataaatctcaggtgctataacatgtagtcatctgttttctgataagaacatcttttactctgacttgcttttatcttagtagtatgcttatggatttagtagtatgcttatggatttgataaatcttatactttttcagttgctgtcttattctctttatttctcattgtgctttcccttcccttctttataatgaaaataaatcttgagtcgttg

SEQ ID NO: 510 - protein, 1962 aa, Homo sapiens
MFRQFYLWTCLASGIILGSLFEICLGQYDDDWQYEDCKLARGGPPATIVAIDEESRNGTILVDNMLIKGTAGGPDPTIELSLKDNVDYWVLMDPVKQMLFLNSTGRVLDRDPPMNIHSIVVQVQCINKKVGTIIYHEVRIVVRDRNDNSPTFKHESYYATVNELTPVGTTIFTGFSGDNGATDIDDGPNGQIEYVIQYNPDDPTSNDTFEIPLMLTGNIVLRKRLNYEDKTRYFVIIQANDRAQNLNERRTTTTTLTVDVLDGDDLGPMFLPCVLVPNTRDCRPLTYQAAIPELRTPEELNPIIVTPPIQAIDQDRNIQPPSDRPGILYSILVGTPEDYPRFFHMHPRTAELSLLEPVNRDFHQKFDLVIKAEQDNGHPLPAFAGLHIEILDENNQSPYFTMPSYQGYILESAPVGATISDSLNLTSPLRIVALDKDIEDTKDPELHLFLNDYTSVFTVTQTGITRYLTLLQPVDREEQQTYTFSITAFDGVQESEPVIVNIQVMDANDNTPTFPEISYDVYVYTDMRPGDSVIQLTAVDADEGSNGEITYEILVGAQGDFIINKTTGLITIAPGVEMIVGRTYALTVQAADNAPPAERRNSICTVYIEVLPPNNQSPPRFPQLMYSLEISEAMRVGAVLLNLQATDREGDSITYAIENGDPQRVFNLSETTGILTLGKALDRESTDRYILIITASDGRPDGTSTATVNIVVTDVNDNAPVFDPYLPRNLSVVEEEANAFVGQVKATDPDAGINGQVHYSLGNFNNLFRITSNGSIYTAVKLNREVRDYYELVVVATDGAVHPRHSTLTLAIKVLDIDDNSPVFTNSTYTVLVEENLPAGTTILQIEAKDVDLGANVSYRIRSPEVKHFFALHPFTGELSLLRSLDYEAFPDQEASITFLVEAFDIYGTMPPGIATVTVIVKDMNDYPPVFSKRIYKGMVAPDAVKGTPITTVYAEDADPPGLPASRVRYRVDDVQFPYPASIFEVEEDSGRVITRVNLNEEPTTIFKLVVVAFDDGEPVMSSSATVKILVLHPGEIPRFTQEEYRPPPVSELATKGTMVGVISAAAINQSIVYSIVSGNEEDTFGINNITGVIYVNGPLDYETRTSYVLRVQADSLEVVLANLRVPSKSNTAKVYIEIQDENNHPPVFQKKFYIGGVSEDARMFTSVLRVKATDKDTGNYSVMAYRLIIPPIKEGKEGFVVETYTGLIKTAMLFHNMRRSYFKFQVIATDDYGKGLSGKADVLVSVVNQLDMQVIVSNVPPTLVEKKIEDLTEILDRYVQEQIPGAKVVVESIGARRHGDAFSLEDYTKCDLTVYAIDPQTNRAIDRNELFKFLDGKLLDINKDFQPYYGEGGRILEIRTPEAVTSIKKRGESLGYTEGALLALAFIIILCCIPAILVVLVSYRQFKVRQAECTKTARIQAALPAAKPAVPAPAPVAAPPPPPPPPPGAHLYEELGDSSMHNLFLLYHFQQSRGNNSVSEDRKHQQVVMPFSSNTIEAHKSAHVDGSLKSNKLKSARKFTFLSDEDDLSAHNPLYKENISQVSTNSDISQRTDFVDPFSPKIQAKSKSLRGPREKIQRLWSQSVSLPRRLMRKVPNRPEIIDLQQWQGTRQKAENENTGICTNKRGSSNPLLTTEEANLTEKEEIRQGETLMIEGTEQLKSLSSDSSFCFPRPHFSFSTLPTVSRTVELKSEPNVISSPAECSLELSPSRPCVLHSSLSRRETPICMLPIETERNIFENFAHPPNISPSACPLPPPPPISPPSPPPAPAPLAPPPDISPFSLFCPPPSPPSIPLPLPPPTFFPLSVSTSGPPTPPLLPPFPTPLPPPPPSIPCPPPPSASFLSTECVCITGVKCTTNLMPAEKIKSSMTQLSTTTVCKTDPQREPKGILRHVKNLAELEKSVANMYSQIEKNYLRTNVSELQTMCPSEVTNMEITSEQNKGSLNNIVEGTEKQSHSQSTSL

SEQ ID NO: 511 - DNA, 487 bp, Homo sapiens
  CDS (37)..(429)
actcactttctgacttaggccacaggtcgttttaccatgtctggacgtggcaagcagggcggcaaggctcgcgccaaggccaaaacccgctcctctagagctgggctccaatttcctgtaggacgagtgcaccgcctgctccgcaagggcaactacgctgagcgggtcggggccggcgcgccggtttacctggcggcggtgctggagtacctaactgccgagatcctggagctggcgggcaacgcagcccgcgacaacaaaaagacccgcatcatcccgcgccacttgcagctggccatccgcaacgacgaggagctcaacaagctgcttggtaaagttaccatcgctcagggcggtgttctgcctaacatccaggccgtactgctccccaagaagactgagagccaccacaaagctaagggcaagtaagggctgaactttaaaaatgtaaacttacaagacaaaaggctcttttcagagccaccca

SEQ ID NO: 512 - protein, 130 aa, Homo sapiens
MSGRGKQGGKARAKAKTRSSRAGLQFPVGRVHRLLRKGNYAERVGAGAPVYLAAVLEYLTAEILELAGNAARDNKKTRIIPRHLQLAIRNDEELNKLLGKVTIAQGGVLPNIQAVLLPKKTESHHKAKGK

SEQ ID NO: 513 - DNA, 3341 bp, Homo sapiens
  CDS (149)..(1483)
cattgtctctcgctgacgccagagatccagctatcgtcttcactgctctgtgccgtcagctcctagaggcccagcctctgtggccctgtgacctgcaggtattaggagggtcacagctaggacgccgggaccccctggaagcctagaaatgggaccattgcaatttagagatgtggccatagaattctctctggaggagtggcattgcctggacgctgcacagcggaatctatatagggatgtgatgttagagaactacagaaacctgatcttccttggtattgttgtctctaaaccaaacctgatcacctgtctggagcaaggaaaaaaacctttaactatgaagaggcatgagatgattgccaaacccccagttatgtattctcattttgcccaagacctttggtcagagcagagcataaaagattctttccaaaaagtgatactaagaagatatgaaaaatgtagacatgacaatttacagttaaaaaaaggctgtgaaagtgtagatgagtgtccagtgcacaaaagaggttataatggacttaaacaatgtttggcaactacccagagaaaaatatttcaatgtgatgaatatgtgaaattcttgcataaattttcaaattcaaacaaacataagataagagatactggaaaaaaatcttttaaatgtatagaatatgggaaaacttttaaccagtcttcaacccgtactacatataagaaaattgatgctggagagaaacgctataaatgtgaagaatgtggtaaagcctataagcagtcctcacaccttactacacataagaaaattcatactggagagaaaccctacaaatgtgaagaatgtggcaaagcctataagcagtcctgtaaccttactacacataagataattcatactggagagaaaccctacagatgtagagaatgtggcaaagcttttaaccaccctgcaacccttttttcacataagaaaattcatactggagagaaaccatacaagtgtgataaatgtggcaaagcctttatttcatcctcaacccttactaaacatgagataattcatactggagagaaaccctacaaatgtgaggaatgtggcaaagcttttaaccgttcctcaaaccttactaaacataagagaattcatactggagatgtaccctacaaatgtgacgaatgtggcaaaacctttacctggtactcaagcctctctaaacataagagagctcatactggagagaaaccctacaagtgtgaagaatgtggcaaagcctttactgcattctcaactctaactgaacataagataattcatactggagagaaaccgtacaaatgtgaagaatgtggcaaagcttttaactggtcctcagcccttaataaacataagaaaattcatattagacagaaaccctgcatagtgaagaatgtggaaaatcttttaaatgttcctcaacccttaataagcataagataattcatactggagagaaaccgtatgaatgtgatgaatgtgggaaagcctttaactagccctggactctgactaaatatgagaatttatatggaacataaaccctacaaatataaagaatgtgacaaagctttttaaggaagttctcaacccttattacacataatttatactggacagaaaccctacaagtgtgaagaatatggcaaagcctataacaacctgtcaactctttttgttttttgagatggagtttcactcttgtcacccaggctggagtgcaatggcacgatctcagctcactgcaacttctgcctcctggtatcaagccattctcctgcctcagcctcccgagtagctgggattactggtgcccaccaccatgcccagctaatttttgtatttttagtagagatggggtttcatcatgtttgccagactggtctccaactcctgacctcagatggtccacccacctcggcatcctaaagtgctgagatgacaggcatgagccacgacgcccagccacaagttctcaattcttaagagacatggcgataattcatgctgaagaggaactctacaaacctgaaagatgcaacagtgcttttaccaccacctccaacttttgtatacataaaaataaattatactaatgtgaaaccctggaaatgtatgaaatgagacaaagcgtttatatggttgccacacttgattgtaggtaagagaattaatgctgccaaaactcctacaagtgtgaagaatgtggcaaaacttttgagtgcttacaccttatttcacaggaaagcttttatccttgagaaaaatcgtacagatataaagaatatggaaacgccattaacgcccactcacatctcaacagaaggttcatagttaataaaagcaataaaagtgcaattactgtcaaaaaatctttcagaaaatataagcctttaaagaagaatatttattctgaaatcagctattacaaatataagggggggttgtagtacctttacttgtatcacagatcttgttgcacacattgtgtactagaggaaaacctgaagcagttgctccagctttattcaacaacatggaatttatattggagaagagtcctgcaaatataatgaatttggaaagactttttttttcaaaatctatagcttagaaaacatcagagagtttatactaaagtatatttttgcagatgtaaatatgaaaaaaatatttaattcaaaattgattttacgtaaatatgagaatttacactagaataaggcactgacacttcagacattacactaaatcagagtattgagtataaaaatgaatccacaactaaagctgtttttgtatataactttaaaagggagattttctgaagcattgtaatttcattgaaagtgtacttgtttcttgaaaaaaatttttgaacagtgaataatgatgtaatacaactttcaaatttctttacgctgttattttattcctattgtggtcacatgtgaaagcatgtgatcaattgttgctgcatcagggatattacagattcttttttattgggtattatgaccttttctataaaagaataaggacattaaaatgtaagatgcatgataaaaatgtaagtggagaggctctttgtagttaacttatattaagtaatgtataaggtgggggttctcatttgtataatcctagcctatgacttaatgttgatgttttgctttgtcttttggatggcctaacctacattaacatgttggcagaccattttaaaactttttttttcaaaaattataatgaattactttattaataaagatttttaaaaagtgaaaaaaaaaaaaaaaaa

SEQ ID NO: 514 - protein, 444 aa, Homo sapiens
MGPLQFRDVAIEFSLEEWHCLDAAQRNLYRDVMLENYRNLIFLGIVVSKPNLITCLEQGKKPLTMKRHEMIAKPPVMYSHFAQDLWSEQSIKDSFQKVILRRYEKCRHDNLQLKKGCESVDECPVHKRGYNGLKQCLATTQRKIFQCDEYVKFLHKFSNSNKHKIRDTGKKSFKCIEYGKTFNQSSTRTTYKKIDAGEKRYKCEECGKAYKQSSHLTTHKKIHTGEKPYKCEECGKAYKQSCNLTTHKIIHTGEKPYRCRECGKAFNHPATLFSHKKIHTGEKPYKCDKCGKAFISSSTLTKHEIIHTGEKPYKCEECGKAFNRSSNLTKHKRIHTGDVPYKCDECGKTFTWYSSLSKHKRAHTGEKPYKCEECGKAFTAFSTLTEHKIIHTGEKPYKCEECGKAFNWSSALNKHKKIHIRQKPCIVKNVENLLNVPQPLISIR

SEQ ID NO: 515 - DNA, 1725 bp, Homo sapiens
  CDS (58)..(1557)
ctacgggcaccgtggccacacctgcctgcacagccagggccaggaggaggagatgccatgaccctcattctcacaagcctgctcttctttgggctgagcctgggccccaggacccgggtgcaggcagaaaacctacccaaacccatcctgtgggccgagccaggtcccgtgatcacctggcataaccccgtgaccatctggtgtcagggcaccctggaggcccaggggtaccgtctggataaagagggaaactcaatgtcgaggcacatattaaaaacactggagtctgaaaacaaggtcaaactctccatcccatccatgatgtgggaacatgcagggcgatatcactgttactatcagagccctgcaggctggtcagagcccagcgaccccctggagctggtggtgacagcctacagcagacccaccctgtccgcactgccaagccctgtggtgacctcaggagtgaacgtgaccctccggtgtgcctcacggctgggactgggcaggttcactctgattgaggaaggagaccacaggctctcctggaccctgaactcacaccaacacaaccatggaaagttccaggccctgttccccatgggccccctgaccttcagcaacaggggtacattcagatgctacggctatgaaaacaacaccccatacgtgtggtcggaacccagtgaccccctgcagctactggtgtcaggcgtgtctaggaagccctccctcctgaccctgcagggccctgtcgtgacccccggagagaatctgaccctccagtgtggctctgatgtcggctacatcagatacactctgtacaaggagggggccgatggcctcccccagcgccctggccggcagccccaggctgggctctcccaggccaacttcaccctgagccctgtgagccgctcctacgggggccagtacagatgctacggcgcacacaacgtctcctccgagtggtcggcccccagtgaccccctggacatcctgatcgcaggacagatctctgacagaccctccctctcagtgcagccgggccccacggtgacctcaggagagaaggtgaccctgctgtgtcagtcatgggacccgatgttcactttccttctgaccaaggagggggcagcccatcccccgttgcgtctgagatcaatgtacggagctcataagtaccaggctgaattccccatgagtcctgtgacctcagcccacgcggggacctacaggtgctacggctcacgcagctccaacccctacctgctgtctcaccccagtgagcccctggagctcgtggtctcaggagcaactgagaccctcaatccagcacaaaagaagtcagattccaagactgccccacacctccaggattacacagtggagaatctcatccgcatgggtgtggctggcttggtcctgctgttcctcgggattctgttatttgaggctcagcacagccagagaagccccccaaggtgcagccaggaggcaaacagcagaaaggacaatgcacccttcagagtggtggagccttgggaacagatctgatgatctgaggaggttctggaagactggggcagcagttggggaagtgtctgctgagaatatcaaggggaagaagcatgggtcaggtgcaggaagatgtctgggtgtctgtagaagatgcttcctccattaaactgtggtgctttcctcctcaaaaaaaaaaaaaaaaaa

SEQ ID NO: 516 - protein, 499 aa, Homo sapiens
MTLILTSLLFFGLSLGPRTRVQAENLPKPILWAEPGPVITWHNPVTIWCQGTLEAQGYRLDKEGNSMSRHILKTLESENKVKLSIPSMMWEHAGRYHCYYQSPAGWSEPSDPLELVVTAYSRPTLSALPSPVVTSGVNVTLRCASRLGLGRFTLIEEGDHRLSWTLNSHQHNHGKFQALFPMGPLTFSNRGTFRCYGYENNTPYVWSEPSDPLQLLVSGVSRKPSLLTLQGPVVTPGENLTLQCGSDVGYIRYTLYKEGADGLPQRPGRQPQAGLSQANFTLSPVSRSYGGQYRCYGAHNVSSEWSAPSDPLDILIAGQISDRPSLSVQPGPTVTSGEKVTLLCQSWDPMFTFLLTKEGAAHPPLRLRSMYGAHKYQAEFPMSPVTSAHAGTYRCYGSRSSNPYLLSHPSEPLELVVSGATETLNPAQKKSDSKTAPHLQDYTVENLIRMGVAGLVLLFLGILLFEAQHSQRSPPRCSQEANSRKDNAPFRVVEPWEQI

SEQ ID NO: 517 - DNA, 1068 bp, Homo sapiens
  CDS (144)..(878)
ctcccagggagggcagcgcaagacagcaagtcatctccatttcctggcccactttcaaaatggcagccggaaggaaatttgtgattagaagccgcgctgttcttatttaagagcgttagcgcaacttccggtattgttgcaagatggccgcgcccagtgatggattcaagcctcgtgaacgaagcggtggggagcaggcacaggactgggatgctctgccacccaagcggccccgactaggggcaggaaacaagatcggaggccgtaggcttattgtggtgctggaaggggccagtctggagacagtcaaggtagggaagacatatgagctactcaactgtgacaagcacaagtctatattgttgaagaatggacgggaccctggggaagcgcggccagatatcacccaccagagtttgctgatgctgatggatagtcccctgaaccgagctggcttgctacaggtttatatccatacacagaagaatgttctgattgaagtgaatccccagacccgaattcccagaacctttgaccgcttttgtggcctcatggttcaacttttacacaagctcagtgttcgagcagctgatggcccccagaagcttttgaaggtaattaagaatccagtatcagatcactttccagttggatgtatgaaagttggcacttctttttccatcccggttgtcagtgatgtgcgtgagctggtgcccagcagtgatcctattgtttttgtggtaggggcctttgcccatggcaaggtcagtgtggagtatacagagaagatggtgtccatcagtaactaccccctttctgctgccctcacctgtgcaaaacttaccacagcctttgaggaagtatggggggtcatttgacagtagtagaacctgttctgaaaccagaaactgttgatgtcacatcctttgaccctggtctgagctgactgctggaagatgatctttctgcactgagactgtggagtttggggaagccaaggctgtacatttgctatttgtttatcctatgaatactgttcttgcaaacctgaaaaaaaaaaaaaaaaaa

SEQ ID NO: 518 - protein, 244 aa, Homo sapiens
MAAPSDGFKPRERSGGEQAQDWDALPPKRPRLGAGNKIGGRRLIVVLEGASLETVKVGKTYELLNCDKHKSILLKNGRDPGEARPDITHQSLLMLMDSPLNRAGLLQVYIHTQKNVLIEVNPQTRIPRTFDRFCGLMVQLLHKLSVRAADGPQKLLKVIKNPVSDHFPVGCMKVGTSFSIPVVSDVRELVPSSDPIVFVVGAFAHGKVSVEYTEKMVSISNYPLSAALTCAKLTTAFEEVWGVI

SEQ ID NO: 519 - DNA, 1327 bp, Homo sapiens
  CDS (277)..(699)
ggtcgacgacgtggcagccgggatgcactaggcaaagccagctgggctcctgagtccggtgggtacttggagaacttactacgtctagctggaggattgtaaatgtaccaatcagcatgctgtgtctagctcaagaactcaagctccatgaggagatgtttcattgtcgagagcagtcatgatggcctgcactccacacaatgcaacagagtgaaagagcaggttctgcttctttggtgtagtcctgaagcttcctaagaaacttcacatcaggtgatggataggagcaaccctgtaaaaccagccttagactattttttaaacaggctggtgaattaccagatctccgtcaagtgcagtaaccagttcaagttggaagtgtgtcttttgaatgcagaaaacaaagtcgtggacaaccaggctgggacccagggccagctgaaggtgctgggtgccaacctctggtggccgtacctgatgcacgaacaccccgcctacctctactcgtgggaggatggtgattgctcacaccaaagccttggacccctcccagcctgtgacctttgtgaccaactccacctacgcagcagacaagggggctctgtatgtggatgtgatccgtgtgaacagctactactcttggtatcgcaactacgggcacctggagttgattcagctgcagctggccgcccagtttgagaattggtgtaagacatcacaatcccattattcagagcgcgtatggagtggaaacgcttgtagggtttcaccagtctttcccagggaactccgatgaagtgttccaacaaaatgagcgagtgaaccaagaagaggatgacattagatccaggagatacaacagaggagataatctccaggatgcctgtgaagaaagatccctggatcccaggatgattataggacaagttgttcataatccagcaggccagaagacttccagggaaactcattcaaggaggtgaaaatgatggatgactcctccaagatgaaaatggaccagccgcagtgctcacgcctgtaataccagcactttgggaggctgaggcaggcggatcacttgaggtcaggagtttgaaactagcctggccaacgtggcaaaactccatctctattaaaaatacaaaaattagccaggcatagtggtgcatgcctgtagtcccagctacttgggatgccgaggcaggaagaattgcttgaacctgggaggcagagtctgcagtgagccgagatcatgccactgcactccagcctgggtgacagagccactccgtctcaaaaaaaaaaaaaaaaaaaaaaaaaaaaaaaa

SEQ ID NO: 520 - protein, 140 aa, Homo sapiens [sequence omitted]

SEQ ID NO: 521 - DNA, 3350 bp, Homo sapiens
  CDS (325)..(1698)
tagtcgcggggcaggtacgtgcgctcgcggttctctcgcggaggtcggcggtggcgggagcgggctccggagagcctgagagcacggtggggcggggcgggagaaagtggccgcccggaggacgttggcgtttacgtgtggaagagcggaagagttttgcttttcgtgcgcgccttcgaaaactgcctgccgctgtctgaggagtccacccgaaacctcccctcctccgccggcagccccgcgctgagctcgccgacccaagccagcgtgggcgaggtgggaagtgcgcccgacccgcgcctggagctgcgcccccgagtgcccatggctacaagggtgctgagcatgagcgcccgcctgggacccgtgccccagccgccggcgccgcaggacgagccggtgttcgcgcagctcaagccggtgctgggcgccgcgaatccggcccgcgacgcggcgctcttccccggcgaggagctgaagcacgcgcaccaccgcccgcaggcgcagcccgcgcccgcgcaggccccgcagccggcccagccgcccgccaccggcccgcggctgcctccagaggacctggtccagacaagatgtgaaatggagaagtatctgacacctcagcttcctccagttcctataattccagagcataaaaagtatagacgagacagtgcctcagtcgtagaccagttcttcactgacactgaagggttaccttacagtatcaacatgaacgtcttcctccctgacatcactcacctgagaactggcctctacaaatcccagagaccgtgcgtaacacacatcaagacagaacctgttgccattttcagccaccagagtgaaacgactgcccctcctccggccccgacccaggccctccctgagttcaccagtatattcagctcacaccagaccgcagctccagaggtgaacaatattttcatcaaacaagaacttcctacaccagatcttcatctttctgtccctacccagcagggccacctgtaccagctactgaatacaccggatctagatatgcccagttctacaaatcagacagcagcaatggacactcttaatgtttctatgtcagctgccatggcaggccttaacacacacacctctgctgttccgcagactgcagtgaaacaattccagggcatgcccccttgcacatacacaatgccaagtcagtttcttccacaacaggccacttactttcccccgtcaccaccaagctcagagcctggaagtccagatagacaagcagagatgctccagaatttaaccccacctccatcctatgctgctacaattgcttctaaactggcaattcacaatccaaatttacccaccaccctgccagttaactcacaaaacatccaacctgtcagatacaatagaaggagtaaccccgatttggagaaacgacgcatccactactgcgattaccctggttgcacaaaagtttataccaagtcttctcatttaaaagctcacctgaggactcacactggtgaaaagccatacaagtgtacctgggaaggctgcgactggaggttcgcgcgatcggatgagctgacccgccactaccggaagcacacaggcgccaagcccttccagtgcggggtgtgcaaccgcagcttctcgcgctctgaccacctggccctgcatatgaagaggcaccagaactgagcactgcccgtgtgacccgttccaggtcccctgggctccctcaaatgacagacctaactattcctgtgtaaaaacaacaaaaacaaacaaaagcaagaaaaccacaactaaaactggaaatgtatattttgtatatttgagaaaacagggaatacattgtattaataccaaagtgtttggtcattttaagaatctggaatgcttgctgtaatgtatatggctttactcaagcagatctcatctcatgacaggcagccacgtctcaacatgggtaaggggtgggggtggaggggagtgtgtgcagcgtttttacctaggcaccatcatttaatgtgacagtgttcagtaaacaaatcagttggcaggcaccagaagaagaatggattgtatgtcaagattttacttggcattgagtagtttttttcaatagtaggtaattccttagagatacagtatacctggcaattcacaaatagccattgaacaaatgtgtgggtttttaaaaattatatacatatatgagttgcctatatttgctattcaaaattttgtaaatatgcaaatcagctttataggtttattacaagttttttaggattcttttggggaagagtcataattcttttgaaaataaccatgaatacacttacagttaggatttgtggtaaggtacctctcaacattaccaaaatcatttctttagagggaaggaataatcattcaaatgaactttaaaaaagcaaatttcatgcactgattaaaataggattattttaaatacaaaaggcattttatatgaattataaactgaagagcttaaagatagttacaaaatacaaaagttcaacctcttacaataagctaaacgcaatgtcatttttaaaaagaaggacttagggtgtcgttttcacatatgacaatgttgcatttatgatgcagtttcaagtaccaaaacgttgaattgatgatgcagttttcatatatcgagatgttcgctcgtgcagtactgttggttaaatgacaatttatgtggattttgcatgtaatacacagtgagacacagtaattttatctaaattacagtgcagtttagttaatctattaatactgactcagtgtctgcctttaaatataaatgatatgttgaaaacttaaggaagcaaatgctacatatatgcaatataaaatagtaatgtgatgctgatgctgttaaccaaagggcagaataaataagcaaaatgccaaaaggggtcttaattgaaatgaaaatttaattttgtttttaaaatattgtttatctttatttattttgtggtaatatagtaagtttttttagaagacaattttcataacttgataaattatagttttgtttgttagaaaagttgctcttaaaagatgtaaatagatgacaaacgatgtaaataattttgtaagaggcttcaaaatgtttatacgtggaaacacacctacatgaaaagcagaaatcggttgctgttttgcttctttttccctcttatttttgtattgtggtcatttcctatgcaaataatggagcaaacagctgtatagttgtagaattttttgagagaatgagatgtttatatattaacgacaattttttttttggaaaataaaaagtgcctaaaaga

SEQ ID NO: 522 - protein, 457 aa, Homo sapiens
MATRVLSMSARLGPVPQPPAPQDEPVFAQLKPVLGAANPARDAALFPGEELKHAHHRPQAQPAPAQAPQPAQPPATGPRLPPEDLVQTRCEMEKYLTPQLPPVPIIPEHKKYRRDSASVVDQFFTDTEGLPYSINMNVFLPDITHLRTGLYKSQRPCVTHIKTEPVAIFSHQSETTAPPPAPTQALPEFTSIFSSHQTAAPEVNNIFIKQELPTPDLHLSVPTQQGHLYQLLNTPDLDMPSSTNQTAAMDTLNVSMSAAMAGLNTHTSAVPQTAVKQFQGMPPCTYTMPSQFLPQQATYFPPSPPSSEPGSPDRQAEMLQNLTPPPSYAATIASKLAIHNPNLPTTLPVNSQNIQPVRYNRRSNPDLEKRRIHYCDYPGCTKVYTKSSHLKAHLRTHTGEKPYKCTWEGCDWRFARSDELTRHYRKHTGAKPFQCGVCNRSFSRSDHLALHMKRHQN

SEQ ID NO: 523 - DNA, 1681 bp, Homo sapiens
  CDS (45)..(1106)
ggaggaagttataaagagggtacgagggggccagctggagagccatgcagtccaagcgggattgtgagctgtggtgtgagagggtgaatccagagaacaaggcggcgctggaggcgtgggtcagggagacaggcatccgcctggtgcaggtgaacgggcagaggaagtatggcgggccacccccaggctgggtgggcagcccgccgccagctgggtcagaggtgttcatcgggcggctgcctcaggacgtgtacgagcaccagcttatcccgctgttccagcgcgtgggccgcctctacgagttccgcctgatgatgaccttcagcggcctgaaccgcggcttcgcctatgcccgctacagctcgaggcgcggcgcgcaggccgccatcgccacgctgcacaaccatccgctgcggccgtcctgcccgctgctcgtgtgccgcagcaccgagaagtgtgagctgagcgttgacggcctgccgccgaatctgacccgcagcgcgctgctgctcgcgctgcagccgctgggtcccggcttgcaggaggcgcggctgctgcccagccccggaccggcgcccgggcagatcgctctgctcaaattcagctcgcaccgggccgctgccatggccaaaaaggccctggtggaagggcagtcacacctctgtggagagcaggtggctgtggagtggctcaagccagacctgaagcagcgacttcgccagcagcttgtgggtcccttcttgcggtccccacagccagagggcagccagttggctttggcaagggacaagttagggttccaaggggctcgggctaccctgcagttgctgtgccaacgaatgaagctgggcagccctgtgttcctcaccaagtgtttgggcataggacctgctggctggcaccgcttctggtaccaggtggtgattcctgggcatccggtgcccttcagcggcctcatctgggttgtgctgaccctagatggccgggatgggcatgaggtggccaaggatgctgtgtctgtacggctgctgcaggcactcagtgagtctggggccaacctcctgtggtctgctggggctgaggcaggtaccatggttaaacagtgactccattctttctccacaggcaccctgaatgggcatgcagagcctgtgtcaggccccatcccagcaggcctgggtggccactttctgacccccaaaggtggggaggggcatgggcccaggcccatcagcctccctgctgggacagggacctatggcacctgggggcagcttgggtttgggttaagttgtggtgaggggccttgccctcccgctcccagcccagggtccaacctgacccagtgatcttccatggccgttccttgtcccacccccacccgatcataccttcccccctctgccacagcttagcatgaatcttctttattgtcctgatttgtcctctttgttggtttttatttgtggggaagggcagctgagccaaaggggtcagaaattctgccctttgcctccaccacatggcattctggttttggtttctgtatagttttgggtctttctatgctggttgtatttatattaaacccctggttagtataaaaaaaaaaaaaaaaaaaaaaaaaaaaaaaaaaaaaaaaaaaaaaaaaaaaaaaaaaaaaaaaaaaaaaaaaaaaaaa

SEQ ID NO: 524 - protein, 353 aa, Homo sapiens
MQSKRDCELWCERVNPENKAALEAWVRETGIRLVQVNGQRKYGGPPPGWVGSPPPAGSEVFIGRLPQDVYEHQLIPLFQRVGRLYEFRLMMTFSGLNRGFAYARYSSRRGAQAAIATLHNHPLRPSCPLLVCRSTEKCELSVDGLPPNLTRSALLLALQPLGPGLQEARLLPSPGPAPGQIALLKFSSHRAAAMAKKALVEGQSHLCGEQVAVEWLKPDLKQRLRQQLVGPFLRSPQPEGSQLALARDKLGFQGARATLQLLCQRMKLGSPVFLTKCLGIGPAGWHRFWYQVVIPGHPVPFSGLIWVVLTLDGRDGHEVAKDAVSVRLLQALSESGANLLWSAGAEAGTMVKQ

SEQ ID NO: 525 - DNA, 1604 bp, Homo sapiens
  CDS (58)..(1485)
cctccgcccgcccgcctgcctgcctgcccgcccgctcgctcgcccggcccgcgactcatgtcccgccgcaaggccggcagcgcgccccgccgagtagagcccgcgcccgccgccaacccagacgacgagatggaaatgcaggacctcgtcatcgaactcaagcccgagccagacgcgcagccccaacaggccccaaggctggggcccttctccccgaaggaggtgtcctcggcggggcggttcggcggcgaaccccaccactcccctggccccatgcccgccggggccgccctcctcgccctcggcccgcggaacccgtggaccctgtggacgccgttgaccccgaactatcccgaccgccagccctggaccgacaaacacccagatctgttgacctgcggccgctgcctgcagaccttcccgttggaggccatcactgccttcatggaccacaagaagctgggctgtcagctcttcagaggccccagccgcggccagggctcagaacgagaggagctgaaggccttgagctgcctgcgctgtggcaaacagttcacagtggcctggaagctgctgcgtcacgcccagtgggaccacggactgtccatctaccagacagaatcagaggccccggaggccccgctcctgggcctggccgaggtggctgcagccgtgtcggcagtggtggggccagcagctgaggccaagagcccccgtgcaagtggcagcggcctcacccggcggagccccacctgtcctgtgtgcaagaagaccctcagctccttcagcaacctcaaagtgcacatgcgctcacacacaggcgagcggccctatgcttgcgaccagtgtccctacgcctgcgcccagagcagcaagctcaaccgccacaagaagacccaccggcaggtgccgccccagagccccctcatggccgacaccagccaggagcaggcctctgcagcccctccggagccggctgtccatgctgctgcccccaccagcacccttccatgcagcggtggtgagggggctggagccgccgccacagcaggtgtccaggaacccggggctcctggcagtggggctcaagccggccctggtggagacacttggggagccatcaccacggaacaaagaactgaccctgcaaacagccagaaggcatcacccaaaaagatgcccaagtcagggggcaagagccgcgggcccgggggcagctgtgagttctgcgggaagcattttaccaacagcagcaacctgacggtgcaccggcgctcacacaccggggagcgcccctacacctgtgagttctgcaactacgcctgcgcccagagcagtaagctcaaccgccaccgccgcatgcacggcatgacgcctggcagcacccgcttcgagtgcccccactgccatgtgcccttcggcctgcgagccaccctggacaaacacctgcggcagaagcaccctgaggcggccggcgaggcctgagcccaggaaagcccccctcactgtccctggtaccgctgccaacacccattgacctcctcgtttttgcccgccttctccaagtaaattttcccttttatttaaaaaaaaaaaaaaaaaaa

SEQ ID NO: 526 - protein, 475 aa, Homo sapiens
MSRRKAGSAPRRVEPAPAANPDDEMEMQDLVIELKPEPDAQPQQAPRLGPFSPKEVSSAGRFGGEPHHSPGPMPAGAALLALGPRNPWTLWTPLTPNYPDRQPWTDKHPDLLTCGRCLQTFPLEAITAFMDHKKLGCQLFRGPSRGQGSEREELKALSCLRCGKQFTVAWKLLRHAQWDHGLSIYQTESEAPEAPLLGLAEVAAAVSAVVGPAAEAKSPRASGSGLTRRSPTCPVCKKTLSSFSNLKVHMRSHTGERPYACDQCPYACAQSSKLNRHKKTHRQVPPQSPLMADTSQEQASAAPPEPAVHAAAPTSTLPCSGGEGAGAAATAGVQEPGAPGSGAQAGPGGDTWGAITTEQRTDPANSQKASPKKMPKSGGKSRGPGGSCEFCGKHFTNSSNLTVHRRSHTGERPYTCEFCNYACAQSSKLNRHRRMHGMTPGSTRFECPHCHVPFGLRATLDKHLRQKHPEAAGEA

SEQ ID NO: 527 - DNA, 7219 bp, Homo sapiens
  CDS (102)..(5075)
ggaccccggcaagcccgcgcacttggcaggagctgtagctaccgccgtccgcgcctccaaggtttcacggcttcctcagcagagactcgggctcgtccgccatgtccgccgcagacgaggttgacgggctgggcgtggcccggccgcactatggctctgtcctggataatgaaagacttactgcagaggagatggatgaaaggagacgtcagaacgtggcttatgagtacctttgtcatttggaagaagcgaagaggtggatggaagcatgcctaggggaagatctgcctcccaccacagaactggaggaggggcttaggaatggggtctaccttgccaaactggggaacttcttctctcccaaagtagtgtccctgaaaaaaatctatgatcgagaacagaccagatacaaggcgactggcctccactttagacacactgataatgtgattcagtggttgaatgccatggatgagattggattgcctaagattttttacccagaaactacagatatctatgatcgaaagaacatgccaagatgtatctactgtatccatgcactcagtttgtacctgttcaagctaggcctggcccctcagattcaagacctatatggaaaggttgacttcacagaagaagaaatcaacaacatgaagactgagttggagaagtatggcatccagatgcctgcctttagcaagattgggggcatcttggctaatgaactgtcagtggatgaagccgcattacatgctgctgttattgctattaatgaagctattgaccgtagaattccagccgacacatttgcagctttgaaaaatccgaatgccatgcttgtaaatcttgaagagcccttggcatccacttaccaggatatactttaccaggctaagcaggacaaaatgacaaatgctaaaaacaggacagaaaactcagagagagaaagagatgtttatgaggagctgctcacgcaagctgaaattcaaggcaatataaacaaagtcaatacattttctgcattagcaaatatcgacctggctttagaacaaggagatgcactggccttgttcagggctctgcagtcaccagccctggggcttcgaggactgcagcaacagaatagcgactggtacttgaagcagctcctgagtgataaacagcagaagagacagagtggtcagactgaccccctgcagaaggaggagctgcagtctggagtggatgctgcaaacagtgctgcccagcaatatcagagaagattggcagcagtagcactgattaatgctgcaatccagaagggtgttgctgagaagactgttttggaactgatgaatcccgaagcccagctgccccaggtgtatccatttgccgccgatctctatcagaaggagctggctaccctgcagcgacaaagtcctgaacataatctcacccacccagagctctctgtcgcagtggagatgttgtcatcggtggccctgatcaacagggcattggaatcaggagatgtgaatacagtgtggaagcaattgagcagttcagttactggtcttaccaatattgaggaagaaaactgtcagaggtatctcgatgagttgatgaaactgaaggctcaggcacatgcagagaataatgaattcattacatggaatgatatccaagcttgcgtggaccatgtgaacctggtggtgcaagaggaacatgagaggattttagccattggtttaattaatgaagccctggatgaaggtgatgcccaaaagactctgcaggccctacagattcctgcagctaaacttgagggagtccttgcagaagtggcccagcattaccaagacacgctgattagagcgaagagagagaaagcccaggaaatccaggatgagtcagctgtgttatggttggatgaaattcaaggtggaatctggcagtccaacaaagacacccaagaagcacagaagtttgccttaggaatctttgccattaatgaggcagtagaaagtggtgatgttggcaaaacactgagtgcccttcgctcccctgatgttggcttgtatggagtcatccctgagtgtggtgaaacttaccacagtgatcttgctgaagccaagaagaaaaaactggcagtaggagataataacagcaagtgggtgaagcactgggtaaaaggtggatattattattaccacaatctggagacccaggaaggaggatgggatgaacctccaaattttgtgcaaaattctatgcagctttctcgggaggagatccagagttctatctctggggtgactgccgcatataaccgagaacagctgtggctggccaatgaaggcctgatcaccaggctgcaggctcgctgccgtggatacttagttcgacaggaattccgatccaggatgaatttcctgaagaaacaaatccctgccatcacctgcattcagtcacagtggagaggatacaagcagaagaaggcatatcaagatcggttagcttacctgcgctcccacaaagatgaagttgtaaagattcagtccctggcaaggatgcaccaagctcgaaagcgctatcgagatcgcctgcagtacttccgggaccatataaatgacattatcaaaatccaggcttttattcgggcaaacaaagctcgggatgactacaagactctcatcaatgctgaggatcctcctatggttgtggtccgaaaatttgtccacctgctggaccaaagtgaccaggattttcaggaggagcttgaccttatgaagatgcgggaagaggttatcaccctcattcgttctaaccagcagctggagaatgacctcaatctcatggatatcaaaattggactgctagtgaaaaataagattacgttgcaggatgtggtttcccacagtaaaaaacttaccaaaaaaaataaggaacagttgtctgatatgatgatgataaataaacagaagggaggtctcaaggctttgagcaaggagaagagagagaagttggaagcttaccagcacctgttttatttattgcaaaccaatcccacctatctggccaagctcatttttcagatgccccagaacaagtccaccaagttcatggactctgtaatcttcacactctacaactacgcgtccaaccagcgagaggagtacctgctcctgcggctctttaagacagcactccaagaggaaatcaagtcgaaggtagatcagattcaagagattgtgacaggaaatcctacggttattaaaatggttgtaagtttcaaccgtggtgcccgtggccagaatgccctgagacagatcttggccccagtcgtgaaggaaattatggatgacaaatctctcaacatcaaaactgaccctgtggatatttacaaatcttgggttaatcagatggagtctcagacaggagaggcaagcaaactgccctatgatgtgacccctgagcaggcgctagctcatgaagaagtgaagacacggctagacagctccatcaggaacatgcgggctgtgacagacaagtttctctcagccattgtcagctctgtggacaaaatcccttatgggatgcgcttcattgccaaagtgctgaaggactcgttgcatgagaagttccctgatgctggtgaggatgagctgctgaagattattggtaacttgctttattatcgatacatgaatccagccattgttgctcctgatgcctttgacatcattgacctgtcagcaggaggccagcttaccacagaccaacgccgaaatctgggctccattgcaaaaatgcttcagcatgctgcttccaataagatgtttctgggagataatgcccacttaagcatcattaatgaatatctttcccagtcctaccagaaattcagacggtttttccaaactgcttgtgatgtcccagagcttcaggataaatttaatgtggatgagtactctgatttagtaaccctcaccaaaccagtaatctacatttccattggtgaaatcatcaacacccacactctcctgttggatcaccaggatgccattgctccggagcacaatgatccaatccacgaactgctggacgacctcggcgaggtgcccaccatcgagtccctgataggggaaagctctggcaatttaaatgacccaaataaggaggcactggctaagacggaagtgtctctcaccctgaccaacaagttcgacgtgcctggagatgagaatgcagaaatggatgctcgaaccatcttactgaatacaaaacgtttaattgtggatgtcatccggttccagccaggagagaccttgactgaaatcctagaaacaccagccaccagtgaacaggaagcagaacatcagagagccatgcagagacgtgctatccgtgatgccaaaacacctgacaagatgaaaaagtcaaaatctgtaaaggaagacagcaacctcactcttcaagagaagaaagagaagatccagacaggtttaaagaagctaacagagcttggaaccgtggacccaaagaacaaataccaggaactgatcaacgacattgccagggatattcggaatcagcggaggtaccgacagaggagaaaggccgaactagtgaaactgcaacagacatacgctgctctgaactctaaggccaccttttatggggagcaggtggattactataaaagctatatcaaaacctgcttggataacttagccagcaagggcaaagtctccaaaaagcctagggaaatgaaaggaaagaaaagcaaaaagatttctctgaaatatacagcagcaagactacatgaaaaaggagttcttctggaaattgaggacctgcaagtgaatcagtttaaaaatgttatatttgaaatcagtccaacagaagaagttggagacttcgaagtgaaagccaaattcatgggagttcaaatggagacttttatgttacattatcaggacctgctgcagctacagtatgaaggagttgcagtcatgaaattatttgatagagctaaagtaaatgtcaacctcctgatcttccttctcaacaaaaagttctacgggaagtaattgatcgtttgctgccagcccagaaggatgaaggaaagaagcacctcacagctcctttctaggtccttctttcctcattggaagcaaagacctagccaacaacagcacctcaatctgatacactcccgatgccacatttttaactcctctcgctctgatgggacatttgttacccttttttcatagtgaaattgtgtttcaggcttagtctgacctttctggtttcttcattttcttccattacttaggaaagagtggaaactccactaaaatttctctgtgttgttacagtcttagaggttgcagtactatattgtaagctttggtgtttgtttaattagcaatagggatggtaggattcaaatgtgtgtcatttagaagtggaagctattagcaccaatgacataaatacatacaagacacacaactaaaatgtcatgttattaacagttattaggttgtcatttaaaaataaagttcctttatatttctgtcccatcaggaaaactgaaggatatggggaatcattggttatcttccattgtgtttttctttatggacaggagctaatggaagtgacagtcatgttcaaaggaagcatttctagaaaaaaggagataatgtttttaaatttcattatcaaacttgggcaattctgtttgtgtaactccccgactagtggatgggagagtcccattgctaaaattcagctactcagataaattcagaatgggtcaaggcacctgcctgtttttgttggtgcacagagattgacttgattcagagagacaattcactccatccctatggcagaggaatgggttagccctaatgtagaatgtcattgtttttaaaactgttttatatcttaagagtgccttattaaagtatagatgtatgtcttaaaatgtgggtgataggaattttaaagatttatataatgcatcaaaagccttagaataagaaaagctttttttaaattgctttatctgtatatctgaactcttgaaacttatagctaaaacactaggatttatctgcagtgttcagggagataattctgcctttaattgtctaaaacaaaaacaaaaccagccaacctatgttacacgtgagattaaaaccaattttttccccattttttctccttttttctcttgctgcccacattgtgcctttattttatgagccccagttttctgggcttagtttaaaaaaaaaatcaagtctaaacattgcatttagaaagcttttgttcttggataaaaagtcatacactttaaaaaaaaaaaaaactttttccaggaaaatatattgaaatcatgctgctgagcctctattttctttctttgatgttttgattcagtattcttttatcataaatttttagcatttaaaaattcactgatgtacattaagccaataaactgctttaatgaataacaaactatgtagtgtgtccctattataaatgcattggagaagtatttttatgagactctttactcaggtgcatggttacagcccacagggaggcatggagtgccatggaaggattcgccactacccagaccttgttttttgttgtattttggaagacaggttttttaaagaaacattttcctcagattaaaagatgatgctattacaactagcattgcctcaaaaactgggaccaaccaaagtgtgtcaaccctgtttccttaaaagaggctatgaatcccaaaggccacatccaagacaggcaataatgagcagagtttacagctcctttaataaaatgtgtcagtaattttaaggtttatagttccctcaacacaattgctaatgcagaatagtgtaaaatgcgcttcaagaatgttgatgatgatgatatagaattgtggctttagtagcacagaggatgccccaacaaactcatggcgttgaaaccacacagttctcattactgttatttattagctgtagcattctctgtctcctctctctcctcctttgaccttctcctcgaccagccatcatgacatttaccatgaatttacttcctcccaagagtttggactgcccgtcagattgttgctgcacatagttgcctttgtatctctgtatgaaataaaaggtcatttgttcatgttaaaaaaaaa

SEQ ID NO: 528 - protein, 1657 aa, Homo sapiens
MSAADEVDGLGVARPHYGSVLDNERLTAEEMDERRRQNVAYEYLCHLEEAKRWMEACLGEDLPPTTELEEGLRNGVYLAKLGNFFSPKVVSLKKIYDREQTRYKATGLHFRHTDNVIQWLNAMDEIGLPKIFYPETTDIYDRKNMPRCIYCIHALSLYLFKLGLAPQIQDLYGKVDFTEEEINNMKTELEKYGIQMPAFSKIGGILANELSVDEAALHAAVIAINEAIDRRIPADTFAALKNPNAMLVNLEEPLASTYQDILYQAKQDKMTNAKNRTENSERERDVYEELLTQAEIQGNINKVNTFSALANIDLALEQGDALALFRALQSPALGLRGLQQQNSDWYLKQLLSDKQQKRQSGQTDPLQKEELQSGVDAANSAAQQYQRRLAAVALINAAIQKGVAEKTVLELMNPEAQLPQVYPFAADLYQKELATLQRQSPEHNLTHPELSVAVEMLSSVALINRALESGDVNTVWKQLSSSVTGLTNIEEENCQRYLDELMKLKAQAHAENNEFITWNDIQACVDHVNLVVQEEHERILAIGLINEALDEGDAQKTLQALQIPAAKLEGVLAEVAQHYQDTLIRAKREKAQEIQDESAVLWLDEIQGGIWQSNKDTQEAQKFALGIFAINEAVESGDVGKTLSALRSPDVGLYGVIPECGETYHSDLAEAKKKKLAVGDNNSKWVKHWVKGGYYYYHNLETQEGGWDEPPNFVQNSMQLSREEIQSSISGVTAAYNREQLWLANEGLITRLQARCRGYLVRQEFRSRMNFLKKQIPAITCIQSQWRGYKQKKAYQDRLAYLRSHKDEVVKIQSLARMHQARKRYRDRLQYFRDHINDIIKIQAFIRANKARDDYKTLINAEDPPMVVVRKFVHLLDQSDQDFQEELDLMKMREEVITLIRSNQQLENDLNLMDIKIGLLVKNKITLQDVVSHSKKLTKKNKEQLSDMMMINKQKGGLKALSKEKREKLEAYQHLFYLLQTNPTYLAKLIFQMPQNKSTKFMDSVIFTLYNYASNQREEYLLLRLFKTALQEEIKSKVDQIQEIVTGNPTVIKMVVSFNRGARGQNALRQILAPVVKEIMDDKSLNIKTDPVDIYKSWVNQMESQTGEASKLPYDVTPEQALAHEEVKTRLDSSIRNMRAVTDKFLSAIVSSVDKIPYGMRFIAKVLKDSLHEKFPDAGEDELLKIIGNLLYYRYMNPAIVAPDAFDIIDLSAGGQLTTDQRRNLGSIAKMLQHAASNKMFLGDNAHLSIINEYLSQSYQKFRRFFQTACDVPELQDKFNVDEYSDLVTLTKPVIYISIGEIINTHTLLLDHQDAIAPEHNDPIHELLDDLGEVPTIESLIGESSGNLNDPNKEALAKTEVSLTLTNKFDVPGDENAEMDARTILLNTKRLIVDVIRFQPGETLTEILETPATSEQEAEHQRAMQRRAIRDAKTPDKMKKSKSVKEDSNLTLQEKKEKIQTGLKKLTELGTVDPKNKYQELINDIARDIRNQRRYRQRRKAELVKLQQTYAALNSKATFYGEQVDYYKSYIKTCLDNLASKGKVSKKPREMKGKKSKKISLKYTAARLHEKGVLLEIEDLQVNQFKNVIFEISPTEEVGDFEVKAKFMGVQMETFMLHYQDLLQLQYEGVAVMKLFDRAKVNVNLLIFLLNKKFYGK

SEQ ID NO: 529 - DNA, 513 bp, Homo sapiens
  CDS (1)..(513)
atgcgccgccgcctgtggctgggcctggcctggctgctgctggcgcgggcgccggacgccgcgggaaccccgagcgcgtcgcggggaccgcgcagctacccgcacctggagggcgacgtgcgctggcggcgcctcttctcctccactcacttcttcctgcgcgtggatcccggcggccgcgtgcagggcacccgctggcgccacggccaggacagcatcctggagatccgctctgtacacgtgggcgtcgtggtcatcaaagcagtgtcctcaggcttctacgtggccatgaaccgccggggccgcctctacgggtcgcgactctacaccgtggactgcaggttccgggagcgcatcgaagagaacggccacaacacctacgcctcacagcgctggcgccgccgcggccagcccatgttcctggcgctggacaggaggggggggccccggccaggcggccggacgcggcggtaccacctgtccgcccacttcctgcccgtcctggtctcctga

SEQ ID NO: 530 - protein, 170 aa, Homo sapiens
MRRRLWLGLAWLLLARAPDAAGTPSASRGPRSYPHLEGDVRWRRLFSSTHFFLRVDPGGRVQGTRWRHGQDSILEIRSVHVGVVVIKAVSSGFYVAMNRRGRLYGSRLYTVDCRFRERIEENGHNTYASQRWRRRGQPMFLALDRRGGPRPGGRTRRYHLSAHFLPVLVS

SEQ ID NO: 531 - DNA, 3354 bp, Homo sapiens
  CDS (354)..(1871)
agacgttcggtgatgggagcgcaatatatgaggggatacagtgcctcaggtttaaaagagcaggaagctgagtgagaggttgcagaaaaagtgtcttcgctcggcagaggttacaggtggcatctcagaaagagctttgaggctacaggctgtagtcgggaaggggatcggagaactgtgtgaagggacagcttagggactagcgtcctgggactagggggaagttcgcgactttctgaagactggcaggaatgtgcctcctggccctcgatgcttcccccctgaggggaggcatcgtgagggactgtggcaggcttcactgaacgctgagccggggaggtccaactccacgtatggatccggggaatgagaattcagccacagaggctgccgcgatcatagacctagatcccgacttcgaaccccagagccgtccccgctcctgcacctggccccttccccgaccagagatcgctaaccagccgtccgagccgcccgaggtggagccagatctgggggaaaaggtacacacggaggggcgctcagagccgatcctgttgccctctcggctcccagagccggccgggggcccccagcccggaatcctgggggctgtaacaggtcctcggaagggaggctcccgccggaatgcctggggaaatcagtcatatgcagaactcatcagccaggccattgaaagcgccccggagaagcgactgacacttgcccagatctacgagtggatggtccgtactgtaccctacttcaaggacaagggtgacagcaacagctcagcaggatggaagaactcgatccgccacaacctgtccctgcacagcaagttcatcaaggttcacaacgaggccaccggcaaaagctcttggtggatgctgaaccctgagggaggcaagagcggcaaagccccccgccgccgggccgcctccatggatagcagcagcaagctgctccggggccgcagtaaagcccccaagaagaaaccatctgtgctgccagctccacccgaaggtgccactccaacgagccctgtcggccactttgccaagtggtcaggcagcccttgctctcgaaaccgtgaagaagccgatatgtggaccaccttccgtccacgaagcagttcaaatgccagcagtgtcagcacccggctgtcccccttgaggccagagtctgaggtgctggcggaggaaataccagcttcagtcagcagttatgcagggggtgtccctcccaccctcaatgaaggtctagagctgttagatgggctcaatctcacctcttcccattccctgctatctcggagtggtctctctggcttctctttgcagcatcctggggttaccggccccttacacacctacagcagctcccttttcagcccagcagaggggcccctgtcagcaggagaagggtgcttctccagctcccaggctctggaggccctgctcacctctgatacgccaccaccccctgctgacgtcctcatgacccaggtagatcccattctgtcccaggctccgactcttctgttgctgggggggcttccttcctccagtaagctggccacgggcgtcggcctgtgtcccaagcccctagaggctccaggccccagcagtctggttcccaccctttctatgatagcaccacctccagtcatggcaagtgcccccatccccaaggctctggggactcctgtgctcacaccccctactgaagctgcaagccaagacagaatgcctcaggatctagatcttgatatgtatatggagaacctggagtgtgacatggataacatcatcagtgacctcatggatgagggcgagggactggacttcaactttgagccagatccctgagtcatgcctggaagctttgtcccctgcttcagatgtggagccaggcgtgttcatatctactctttacccttgagccctccccaggaatttgggaccctgctttagagctagggtggggtctggtcacacacaggtgttgaagaaattataaagataaagctgccccatctggggacgatatggggagggagatgggaggggaaaggggagagggtttttctcactgtgccaattagggggtaaggccccctctcaggagccatcatcggctttccccattcctacccacttaggctttgtagcaagatgagcaatgctgttggaaatgtgaagtcaccagtggccttacccctgcctttgggagcaggatttttttgtagagagtcttatctgagctgagccaggctagctggagcctgggatttctatgcagtggccccttaggccagtgatgtgcggtgggtgggctgtttaggggatctggaagggccaaggtctgagcactggagtggctcgccaggccaaatcacccttagaaggctgcagataacagaaaggctttttataaacttttaaagaaatataaacacaaatatagagattttttaaccatggcagggtgctagtggtgggcagaatgcttttttttctttctgaaggctttgtgatagtgacatgatacaaacactacagacaataaatattaggagacacagggaagtggggagaggtggggagtaatagtaaacacagggaagagctcccctacggaccaggtatagagaaaggtctatgcagaaataggttagagtttccctaacaaaaaagctaacccaggtcccctcattccttcaacttgtgcctgggagtgtgtggtgttagggtgcagccacactcttctatgacccagcatgggttagtgctatggtgggagagtacattgaaggcctggaattagcttggggccagggaagggactgggaggggagagaagagaaggagggaaggatttaggatggtaaagttaggtacagagacctccctgttcaaggcccctgacagctgtccctgcccttcttccccttccctgactgcaggggttatgtggaagtgtgtgtggcagcaggcagcggggaggggaggaacagggaagggggagctggggagcttggctgagggtctgggaaatgagcagggatggggggggatgtggatcaggtttactagcacctgccagggaggccatctggggctccttctccaccccagcccccaaagcagcccttcccccagtgccctttgcatcgtcccctcccccacccctgctgtgggttcccatcatttcctgtgtcagcgcctggcctacccagattgtatcatgtgctagattggagtggggaagtgtgtcaaatcaataaatgaataaattcaataaatgcctataaccagcagaaaaaaaaaaaaaaaaaaaaaaaaaaaaaaa

SEQ ID NO: 532 - protein, 505 aa, Homo sapiens
MDPGNENSATEAAAIIDLDPDFEPQSRPRSCTWPLPRPEIANQPSEPPEVEPDLGEKVHTEGRSEPILLPSRLPEPAGGPQPGILGAVTGPRKGGSRRNAWGNQSYAELISQAIESAPEKRLTLAQIYEWMVRTVPYFKDKGDSNSSAGWKNSIRHNLSLHSKFIKVHNEATGKSSWWMLNPEGGKSGKAPRRRAASMDSSSKLLRGRSKAPKKKPSVLPAPPEGATPTSPVGHFAKWSGSPCSRNREEADMWTTFRPRSSSNASSVSTRLSPLRPESEVLAEEIPASVSSYAGGVPPTLNEGLELLDGLNLTSSHSLLSRSGLSGFSLQHPGVTGPLHTYSSSLFSPAEGPLSAGEGCFSSSQALEALLTSDTPPPPADVLMTQVDPILSQAPTLLLLGGLPSSSKLATGVGLCPKPLEAPGPSSLVPTLSMIAPPPVMASAPIPKALGTPVLTPPTEAASQDRMPQDLDLDMYMENLECDMDNIISDLMDEGEGLDFNFEPDP

SEQ ID NO: 533 - DNA, 2377 bp, Homo sapiens
  CDS (63)..(1145)
gaaccctgaagtcggtgtctgctgcgttcacggcaggattcggttaggaggaacagcacagcatgctgggctctggatttaaagctgagcgcttaagagtgaatttgagattagtcataaatcgccttaaactattggagaaaaagaaaacggaactggcccagaaagcaaggaaggagattgctgactatctggctgctgggaaagatgaacgagctcggatccgtgtggagcacattatccgggaagactacctcgtggaggccatggagatcctggagctgtactgtgacctgctgctggctcggtttggccttatccagtctatgaaggaactagattctggtctggctgaatctgtgtctacattgatctgggctgctcctcgactccagtcagaagtggctgagttgaaaatagttgctgatcagctctgtgccaagtatagcaaggaatatggcaagctatgtaggaccaaccagattggaactgtgaatgacaggctaatgcacaagctgagtgtggaagccccacccaaaatcctggtggagagatacctgattgaaattgcaaagaattacaacgtaccctatgaacctgactctgtggtcatggcagaagctcctcctggggtagagacagatcttattgatgttggattcacagatgatgtgaagaaaggaggccctggaagaggagggagtggtggcttcacagcaccagttggtggacctgatggaacggtgccaatgcccatgcccatgcccatgcctatgccatctgcaaatacgcctttctcatatccactgccaaagggaccatcagatttcaatggactgccaatggggacttatcaggcctttcccaatattcatccacctcagataccagcaactcccccatcgtatgaatctatgacattaatgctgataagaatatctcttctgcacagattgttggtcctggacccaagccagaagcctctgcaaagcttccttccagacctgcagataactatgacaactttgtcctaccagagttgccatctgtgccagacacactaccaactgcatctgctggtgccagcacctcagcatctgaagacattgactttgatgatctttcccggaggtttgaagagctgaaaaagaaaacataggtctcttaaaccaggcaactttcacgttttgggagttgagactgagcaatttctccttgtaacaaagaatctccatgaaattctgtttcatctgttaaccgtcactcagcacaacactccctctgggctctcttcctgctcctccagattctgctgctttccagttctctgttgatcctgagactaacaattggagactgaggccagagcaactggctcctggcagctgtgcttgtccgtttcctgtcagagtgatcccaggtttcctcctggcccgtcccatggtccctccacaggagtgtgagaggatgggggaagcactgtgggaagaccaccaaagatggctggacagtgggagagagcacgttgtgaagcatcccagcctcgtgttgaggttccagacttagaaacagacccctctgtacagggggattgtggtgagtgagaatcaaggccaccttgtgtgttttctcactctcgaatgcaagtgggagagggaaaatgactcgggacgccattgtaacggttcctggaagctgggccctctcattggcatatacagtactcctcgctgcagggcactgtcccaccgggatccagttgcaaagtttgtcttgacagttgaaggcctcgcttagttgtactggattctcagggagccctctgtggccttttgctttgcgtgctgtttcccttgtaccagagggcggcaccgtggaaattctgttttccctgtagcatattgtgttggattgcattactggcagagaaaggacaaggtgccattcaagtcctagggtgggcttccagctgccttaatagaagtactcaagtcttttgggtagtgagctggaaagcctacaggaaaagaggggtacctgttttcatttgaaaactttgattcatggaacctttaaaactaatctcagaaaaatttttggtgcccatgcagctgtagttgttcactgctttcctggatggatgggactcttatgtcataacttctgttactcctttggcccatagctaaggtcatccttccccacaggggtggctttgggattggatgatacagcttttgcttctgtgtagtatacctgtacatacttgtttcaggcagcctttctttaatgttttcagttggtttgtattctgtagctcagtagctgctaataaagttaaagatcctgaaaaaaaaaaaaaaaaaaaaaaaaaaaa

SEQ ID NO: 534 - protein, 360 aa, Homo sapiens
MLGSGFKAERLRVNLRLVINRLKLLEKKKTELAQKARKEIADYLAAGKDERARIRVEHIIREDYLVEAMEILELYCDLLLARFGLIQSMKELDSGLAESVSTLIWAAPRLQSEVAELKIVADQLCAKYSKEYGKLCRTNQIGTVNDRLMHKLSVEAPPKILVERYLIEIAKNYNVPYEPDSVVMAEAPPGVETDLIDVGFTDDVKKGGPGRGGSGGFTAPVGGPDGTVPMPMPMPMPMPSANTPFSYPLPKGPSDFNGLPMGTYQAFPNIHPPQIPATPPSYESMTLMLIRISLLHRLLVLDPSQKPLQSFLPDLQITMTTLSYQSCHLCQTHYQLHLLVPAPQHLKTLTLMIFPGGLKS

SEQ ID NO: 535 - DNA, 431 bp, Homo sapiens
  CDS (1)..(315)
atggcacctacggccctgaccggagagagggaaggaaacatctgtgctggggcctgctccctctgccccagcactggggaatcactgccttcctggctgctgccacataccacaatctcctctgctggagaggagaggatgtgttcctcccaggccacggggcccctctgccttgccccaagcacagagctacctaagggactgacctttgccacactggagctcacctcccgggggcctctggcctacccttttccctgccagctgaagagactgccggcagcctggacgtcctggttagctgaaggcagctgaaatgtgggcctccctatgtggggtttagtactgaattatgtgtttgtggttttgcttctttttgtagacccacaaatatttttatttgaatagtaaagagctgtgctcagattgta

SEQ ID NO: 536 - protein, 104 aa, Homo sapiens
MAPTALTGEREGNICAGACSLCPSTGESLPSWLLPHTTISSAGEERMCSSQATGPLCLAPSTELPKGLTFATLELTSRGPLAYPFPCQLKRLPAAWTSWLAEGS

SEQ ID NO: 537 - DNA, 4435 bp, Homo sapiens
  CDS (153)..(4235)
ggcgaggcgcctgttgattggccactggggcccgggttcctccggcggagcgcgcctccccccagatttcccgccagcaggagccgcgcggtagatgcggtgcttttaggagctccgtccgacagaacggttgggccttgccggctgtcggtatgtcgcgacagagcaccctgtacagcttcttccccaagtctccggcgctgagtgatgccaacaaggcctcggccagggcctcacgcgaaggcggccgtgccgccgctgcccccggggcctctccttccccaggcggggatgcggcctggagcgaggctgggcctgggcccaggcccttggcgcgctccgcgtcaccgcccaaggcgaagaacctcaacggagggctgcggagatcggtagcgcctgctgcccccaccagttgtgacttctcaccaggagatttggtttgggccaagatggagggttacccctggtggccttgtctggtttacaaccacccctttgatggaacattcatccgcgagaaagggaaatcagtccgtgttcatgtacagttttttgatgacagcccaacaaggggctgggttagcaaaaggcttttaaagccatatacaggttcaaaatcaaaggaagcccagaagggaggtcatttttacagtgcaaagcctgaaatactgagagcaatgcaacgtgcagatgaagccttaaataaagacaagattaagaggcttgaattggcagtttgtgatgagccctcagagccagaagaggaagaagagatggaggtaggcacaacttacgtaacagataagagtgaagaagataatgaaattgagagtgaagaggaagtacagcctaagacacaaggatctaggcgaagtagccgccaaataaaaaaacgaagggtcatatcagattctgagagtgacattggtggctctgatgtggaatttaagccagacactaaggaggaaggaagcagtgatgaaataagcagtggagtgggggatagtgagagtgaaggcctgaacagccctgtcaaagttgctcgaaagcggaagagaatggtgactggaaatggctctcttaaaaggaaaagctctaggaaggaaacgccctcagccaccaaacaagcaactagcatttcatcagaaaccaagaatactttgagagctttctctgcccctcaaaattctgaatcccaagcccacgttagtggaggtggtgatgacagtagtcgccctactgtttggtatcatgaaactttagaatggcttaaggaggaaaagagaagagatgagcacaggaggaggcctgatcaccccgattttgatgcatctacactctatgtgcctgaggatttcctcaattcttgtactcctgggatgaggaagtggtggcagattaagtctcagaactttgatcttgtcatctgttacaaggtggggaaattttatgagctgtaccacatggatgctcttattggagtcagtgaactggggctggtattcatgaaaggcaactgggcccattctggctttcctgaaattgcatttggccgttattcagattccctggtgcagaagggctataaagtagcacgagtggaacagactgagactccagaaatgatggaggcacgatgtagaaagatggcacatatatccaagtatgatagagtggtgaggagggagatctgtaggatcattaccaagggtacacagacttacagtgtgctggaaggtgatccctctgagaactacagtaagtatcttcttagcctcaaagaaaaagaggaagattcttctggccatactcgtgcatatggtgtgtgctttgttgatacttcactgggaaagtttttcataggtcagttttcagatgatcgccattgttcgagatttaggactctagtggcacactatcccccagtacaagttttatttgaaaaaggaaatctctcaaaggaaactaaaacaattctaaagagttcattgtcctgttctcttcaggaaggtctgatacccggctcccagttttgggatgcatccaaaactttgagaactctccttgaggaagaatattttagggaaaagctaagtgatggcattggggtgatgttaccccaggtgcttaaaggtatgacttcagagtctgattccattgggttgacaccaggagagaaaagtgaattggccctctctgctctaggtggttgtgtcttctacctcaaaaaatgccttattgatcaggagcttttatcaatggctaattttgaagaatatattcccttggattctgacacagtcagcactacaagatctggtgctatcttcaccaaagcctatcaacgaatggtgctagatgcagtgacattaaacaacttggagatttttctgaatggaacaaatggttctactgaaggaaccctactagagagggttgatacttgccatactccttttggtaagcggctcctaaagcaatggctttgtgccccactctgtaaccattatgctattaatgatcgtctagatgccatagaagacctcatggttgtgcctgacaaaatctccgaagttgtagagcttctaaagaagcttccagatcttgagaggctactcagtaaaattcataatgttgggtctcccctgaagagtcagaaccacccagacagcagggctataatgtatgaagaaactacatacagcaagaagaagattattgattttctttctgctctggaaggattcaaagtaatgtgtaaaattatagggatcatggaagaagttgctgatggttttaagtctaaaatccttaagcaggtcatctctctgcagacaaaaaatcctgaaggtcgttttcctgatttgactgtagaattgaaccgatgggatacagcctttgaccatgaaaaggctcgaaagactggacttattactcccaaagcaggctttgactctgattatgaccaagctcttgctgacataagagaaaatgaacagagcctcctggaatacctagagaaacagcgcaacagaattggctgtaggaccatagtctattgggggattggtaggaaccgttaccagctggaaattcctgagaatttcaccactcgcaatttgccagaagaatacgagttgaaatctaccaagaagggctgtaaacgatactggaccaaaactattgaaaagaagttggctaatctcataaatgctgaagaacggagggatgtatcattgaaggactgcatgcggcgactgttctataactttgataaaaattacaaggactggcagtctgctgtagagtgtatcgcagtgttggatgttttactgtgcctggctaactatagtcgagggggtgatggtcctatgtgtcgcccagtaattctgttgccggaagataccccccccttcttagagcttaaaggatcacgccatccttgcattacgaagactttttttggagatgattttattcctaatgacattctaataggctgtgaggaagaggagcaggaaaatggcaaagcctattgtgtgcttgttactggaccaaatatggggggcaagtctacgcttatgagacaggctggcttattagctgtaatggcccagatgggttgttacgtccctgctgaagtgtgcaggctcacaccaattgatagagtgtttactagacttggtgcctcagacagaataatgtcaggtgaaagtacattttttgttgaattaagtgaaactgccagcatactcatgcatgcaacagcacattctctggtgcttgtggatgaattaggaagaggtactgcaacatttgatgggacggcaatagcaaatgcagttgttaaagaacttgctgagactataaaatgtcgtacattattttcaactcactaccattcattagtagaagattattctcaaaatgttgctgtgcgcctaggacatatggcatgcatggtagaaaatgaatgtgaagaccccagccaggagactattacgttcctctataaattcattaagggagcttgtcctaaaagctatggctttaatgcagcaaggcttgctaatctcccagaggaagttattcaaaagggacatagaaaagcaagagaatttgagaagatgaatcagtcactacgattatttcgggaagtttgcctggctagtgaaaggtcaactgtagatgctgaagctgtccataaattgctgactttgattaaggaattatagactgactacattggaagctttgagttgacttctgacaaaggtggtaaattcagacaacattatgatctaataaactttattttttaaaaatgaaaaaaaaaaaaaaaaaaaaaaaaaaaaaaaaaaaaaaaaaaaaaaaaaaaaaaaaaaaaaaaaaaaaaaaaaaaaaaaaaaaaaaaaaaaaaaaaaaaaaaaaaaaa

SEQ ID NO: 538 - protein, 1360 aa, Homo sapiens
MSRQSTLYSFFPKSPALSDANKASARASREGGRAAAAPGASPSPGGDAAWSEAGPGPRPLARSASPPKAKNLNGGLRRSVAPAAPTSCDFSPGDLVWAKMEGYPWWPCLVYNHPFDGTFIREKGKSVRVHVQFFDDSPTRGWVSKRLLKPYTGSKSKEAQKGGHFYSAKPEILRAMQRADEALNKDKIKRLELAVCDEPSEPEEEEEMEVGTTYVTDKSEEDNEIESEEEVQPKTQGSRRSSRQIKKRRVISDSESDIGGSDVEFKPDTKEEGSSDEISSGVGDSESEGLNSPVKVARKRKRMVTGNGSLKRKSSRKETPSATKQATSISSETKNTLRAFSAPQNSESQAHVSGGGDDSSRPTVWYHETLEWLKEEKRRDEHRRRPDHPDFDASTLYVPEDFLNSCTPGMRKWWQIKSQNFDLVICYKVGKFYELYHMDALIGVSELGLVFMKGNWAHSGFPEIAFGRYSDSLVQKGYKVARVEQTETPEMMEARCRKMAHISKYDRVVRREICRIITKGTQTYSVLEGDPSENYSKYLLSLKEKEEDSSGHTRAYGVCFVDTSLGKFFIGQFSDDRHCSRFRTLVAHYPPVQVLFEKGNLSKETKTILKSSLSCSLQEGLIPGSQFWDASKTLRTLLEEEYFREKLSDGIGVMLPQVLKGMTSESDSIGLTPGEKSELALSALGGCVFYLKKCLIDQELLSMANFEEYIPLDSDTVSTTRSGAIFTKAYQRMVLDAVTLNNLEIFLNGTNGSTEGTLLERVDTCHTPFGKRLLKQWLCAPLCNHYAINDRLDAIEDLMVVPDKISEVVELLKKLPDLERLLSKIHNVGSPLKSQNHPDSRAIMYEETTYSKKKIIDFLSALEGFKVMCKIIGIMEEVADGFKSKILKQVISLQTKNPEGRFPDLTVELNRWDTAFDHEKARKTGLITPKAGFDSDYDQALADIRENEQSLLEYLEKQRNRIGCRTIVYWGIGRNRYQLEIPENFTTRNLPEEYELKSTKKGCKRYWTKTIEKKLANLINAEERRDVSLKDCMRRLFYNFDKNYKDWQSAVECIAVLDVLLCLANYSRGGDGPMCRPVILLPEDTPPFLELKGSRHPCITKTFFGDDFIPNDILIGCEEEEQENGKAYCVLVTGPNMGGKSTLMRQAGLLAVMAQMGCYVPAEVCRLTPIDRVFTRLGASDRIMSGESTFFVELSETASILMHATAHSLVLVDELGRGTATFDGTAIANAVVKELAETIKCRTLFSTHYHSLVEDYSQNVAVRLGHMACMVENECEDPSQETITFLYKFIKGACPKSYGFNAARLANLPEEVIQKGHRKAREFEKMNQSLRLFREVCLASERSTVDAEAVHKLLTLIKEL

SEQ ID NO: 539 - DNA, 5046 bp, Homo sapiens
  CDS (109)..(3882)
tgcccccactcccaactcccgccccaagccgcccaccagcccccttcccctccggccggagcctgaaccgagcccggctggctgtgctgcgcggtgccgccgggaaagatggtcgtggcgctgcggtacgtgtggcctctcctcctctgcagcccctgcctgcttatccagatccccgaggaatatgaaggacaccatgtgatggagccacctgtcatcacggaacagtctccacggcgcctggttgtcttccccacagatgacatcagcctcaagtgtgaggccagtggcaagcccgaagtgcagttccgctggacgagggatggtgtccacttcaaacccaaggaagagctgggtgtgaccgtgtaccagtcgccccactctggctccttcaccatcacgggcaacaacagcaactttgctcagaggttccagggcatctaccgctgctttgccagcaataagctgggcaccgccatgtcccatgagatccggctcatggccgagggtgcccccaagtggccaaaggagacagtgaagcccgtggaggtggaggaaggggagtcagtggttctgccttgcaaccctcccccaagtgcagagcctctccggatctactggatgaacagcaagatcttgcacatcaagcaggacgagcgggtgacgatgggccagaacggcaacctctactttgccaatgtgctcacctccgacaaccactcagactacatctgccacgcccacttcccaggcaccaggaccatcattcagaaggaacccattgacctccgggtcaaggccaccaacagcatgattgacaggaagccgcgcctgctcttccccaccaactccagcagccacctggtggccttgcaggggcagccattggtcctggagtgcatcgccgagggctttcccacgcccaccatcaaatggctgcgccccagtggccccatgccagccgaccgtgtcacctaccagaaccacaacaagaccctgcagctgctgaaagtgggcgaggaggatgatggcgagtaccgctgcctggccgagaactcactgggcagtgcccggcatgcgtactatgtcaccgtggaggctgccccgtactggctgcacaagccccagagccatctatatgggccaggagagactgcccgcctggactgccaagtccagggcaggccccaaccagaggtcacctggagaatcaacgggatccctgtggaggagctggccaaagaccagaagtaccggattcagcgtggcgccctgatcctgagcaacgtgcagcccagtgacacaatggtgacccaatgtgaggcccgcaaccggcacgggctcttgctggccaatgcctacatctacgttgtccagctgccagccaagatcctgactgcggacaatcagacgtacatggctgtccagggcagcactgcctaccttctgtgcaaggccttcggagcgcctgtgcccagtgttcagtggctggacgaggatgggacaacagtgcttcaggacgaacgcttcttcccctatgccaatgggaccctgggcattcgagacctccaggccaatgacaccggacgctacttctgcctggctgccaatgaccaaaacaatgttaccatcatggctaacctgaaggttaaagatgcaactcagatcactcaggggccccgcagcacaatcgagaagaaaggttccagggtgaccttcacgtgccaggcctcctttgacccctccttgcagcccagcatcacctggcgtggggacggtcgagacctccaggagcttggggacagtgacaagtacttcatagaggatgggcgcctggtcatccacagcctggactacagcgaccagggcaactacagctgcgtggccagtaccgaactggatgtggtggagagtagggcacagctcttggtggtggggagccctgggccggtgccacggctggtgctgtccgacctgcacctgctgacgcagagccaggtgcgcgtgtcctggagtcctgcagaagaccacaatgcccccattgagaaatatgacattgaatttgaggacaaggaaatggcgcctgaaaaatggtacagtctgggcaaggttccagggaaccagacctctaccaccctcaagctgtcgccctatgtccactacacctttagggttactgccataaacaaatatggccccggggagcccagcccggtctctgagactgtggtcacacctgaggcagccccagagaagaaccctgtggatgtgaagggggaaggaaatgagaccaccaatatggtcatcacgtggaagccgctccggtggatggactggaacgccccccaggttcagtaccgcgtgcagtggcgccctcaggggacacgagggccctggcaggagcagattgtcagcgaccccttcctggtggtgtccaacacgtccaccttcgtgccctatgagatcaaagtccaggccgtcaacagccagggcaagggaccagagccccaggtcactatcggctactctggagaggactacccccaggcaatccctgagctggaaggcattgaaatcctcaactcaagtgccgtgctggtcaagtggcggccggtggacctggcccaggtcaagggccacctccgcggatacaatgtgacgtactggagggagggcagtcagaggaagcacagcaagagacatatccacaaagaccatgtggtggtgcccgccaacaccaccagtgtcatcctcagtggcttgcggccctatagctcctaccacctggaggtgcaggcctttaacgggcgaggatcggggcccgccagcgagttcaccttcagcaccccagagggagtgcctggccaccccgaggcgttgcacctggagtgccagtcgaacaccagcctgctgctgcgctggcagcccccactcagccacaacggcgtgctcaccggctacgtgctctcctaccaccccctggatgaggggggcaaggggcaactgtccttcaaccttcgggaccccgaacttcggacacacaacctgaccgatctcagcccccacctgcggtaccgcttccagcttcaggccaccaccaaagagggccctggtgaagccatcgtacgggaaggaggcactatggccttgtctgggatctcagattttggcaacatctcagccacagcgggtgaaaactacagtgtcgtctcctgggtccccaaggagggccagtgcaacttcaggttccatatcttgttcaaagccttgggagaagagaagggtggggcttccctttcgccacagtatgtcagctacaaccagagctcctacacgcagtgggacctgcagcctgacactgactacgagatccacttgtttaaggagaggatgttccggcaccaaatggctgtgaagaccaatggcacaggccgcgtgaggctccctcctgctggcttcgccactgagggctggttcatcggctttgtgagtgccatcatcctcctgctcctcgtcctgctcatcctctgcttcatcaagcgcagcaagggcggcaaatactcagtgaaggataaggaggacacccaggtggactctgaggcccgaccgatgaaagatgagaccttcggcgagtacaggtccctggagagtgacaacgaggagaaggcctttggcagcagccagccatcgctcaacggggacatcaagcccctgggcagtgacgacagcctggccgattatgggggcagcgtggatgttcagttcaacgaggatggttcgttcattggccagtacagtggcaagaaggagaaggaggcggcagggggcaatgacagctcaggggccacttcccccatcaaccctgccgtggccctagaatagtggagtccaggacaggagatgctgtgcccctggccttgggatccaggcccctccctctccagcaggcccatgggaggctggagttggggcagaggagaacttgctgcctcggatccccttcctaccacccggtccccactttattgccaaaacccagctgcaccccttcctgggcacacgctgctctgccccagcttgggcagatctcccacatgccaggggcctttgggtgctgttttgccagcccatttgggcagagaggctgtggtttgggggagaagaagtaggggtggcccgaaagggtctccgaaatgctgtctttcttgctccctgactgggggcagacatggtggggtctcctcaggaccagggttggcaccttccccctcccccagccactccccagccagcctggctgggactgggaacagaactcggtgtccccaccatctgctgtcttttctttgccatctctgctccaaccgggatgggagccgggcaaactggccgcgggggcaggggaggccatctggagagcccagagtccccccactcccagcatcgcactctggcagcaccgcctcttcccgccgcccagcccaccccatggccggctttcaggagctccatacacacgctgccttcggtacccaccacacaacatccaagtggcctccgtcactacctggctgcggggcgggcacacctcctcccactgcccactggccggcctcttccagccgcccccaccccccaggaccccttagcagccctgccctccctatcgtctgaacagttgtcttcctcagcctcctcccgcccccaccttgggaatgtaaatacaccgtgactttgaaagtttgtacccctgtccttccctttacgccactagtgtgtaggcagatgtctgagtccctaggtggtttctaggattgatagcaattagctttgatgaacccatcccaggaaaaataaaaacagacaaaaaaaaaggaaagattggttctcccagcactgctcagcagccacagcctccctgtatgcctgtgcttggtctactgataagccctctacaaaaaaacaaaagtatatatatatatgtacataatatcagaattataacaggcaaataaaacctgaaaatcaaaaaaaaaaaaaaaaaaa

SEQ ID NO: 540 - protein, 1257 aa, Homo sapiens
MVVALRYVWPLLLCSPCLLIQIPEEYEGHHVMEPPVITEQSPRRLVVFPTDDISLKCEASGKPEVQFRWTRDGVHFKPKEELGVTVYQSPHSGSFTITGNNSNFAQRFQGIYRCFASNKLGTAMSHEIRLMAEGAPKWPKETVKPVEVEEGESVVLPCNPPPSAEPLRIYWMNSKILHIKQDERVTMGQNGNLYFANVLTSDNHSDYICHAHFPGTRTIIQKEPIDLRVKATNSMIDRKPRLLFPTNSSSHLVALQGQPLVLECIAEGFPTPTIKWLRPSGPMPADRVTYQNHNKTLQLLKVGEEDDGEYRCLAENSLGSARHAYYVTVEAAPYWLHKPQSHLYGPGETARLDCQVQGRPQPEVTWRINGIPVEELAKDQKYRIQRGALILSNVQPSDTMVTQCEARNRHGLLLANAYIYVVQLPAKILTADNQTYMAVQGSTAYLLCKAFGAPVPSVQWLDEDGTTVLQDERFFPYANGTLGIRDLQANDTGRYFCLAANDQNNVTIMANLKVKDATQITQGPRSTIEKKGSRVTFTCQASFDPSLQPSITWRGDGRDLQELGDSDKYFIEDGRLVIHSLDYSDQGNYSCVASTELDVVESRAQLLVVGSPGPVPRLVLSDLHLLTQSQVRVSWSPAEDHNAPIEKYDIEFEDKEMAPEKWYSLGKVPGNQTSTTLKLSPYVHYTFRVTAINKYGPGEPSPVSETVVTPEAAPEKNPVDVKGEGNETTNMVITWKPLRWMDWNAPQVQYRVQWRPQGTRGPWQEQIVSDPFLVVSNTSTFVPYEIKVQAVNSQGKGPEPQVTIGYSGEDYPQAIPELEGIEILNSSAVLVKWRPVDLAQVKGHLRGYNVTYWREGSQRKHSKRHIHKDHVVVPANTTSVILSGLRPYSSYHLEVQAFNGRGSGPASEFTFSTPEGVPGHPEALHLECQSNTSLLLRWQPPLSHNGVLTGYVLSYHPLDEGGKGQLSFNLRDPELRTHNLTDLSPHLRYRFQLQATTKEGPGEAIVREGGTMALSGISDFGNISATAGENYSVVSWVPKEGQCNFRFHILFKALGEEKGGASLSPQYVSYNQSSYTQWDLQPDTDYEIHLFKERMFRHQMAVKTNGTGRVRLPPAGFATEGWFIGFVSAIILLLLVLLILCFIKRSKGGKYSVKDKEDTQVDSEARPMKDETFGEYRSLESDNEEKAFGSSQPSLNGDIKPLGSDDSLADYGGSVDVQFNEDGSFIGQYSGKKEKEAAGGNDSSGATSPINPAVALE

SEQ ID NO: 541 - DNA, 3278 bp, Homo sapiens
  CDS (334)..(2211)
aggcacacaggcaaaatcaagttctacatctgtccctgtgtatgtcacttgtttgaatacgaaataaaattaaaaaaataaattcagtgtattgagaaagcaagcaattctctcaaggtatatttctgacatactaagattttaacgactttcacaaatatgctgtactgagagagaatgttacataacattgagaactagtacaagtaaatattaaagtgaagtgaccatttcctacacaagctcattcagaggaggatgaagaccattttggaggaagaaaagcacccttattaagaattgcagcaagtaagccaacaaggtcttttcaggatgattttcttatatcaagtggtacatttcattttatttacttcagtttctggtgaatgtgtgactcagttgttgaaggacacctgctttgaaggaggggacattactacggtcttcacaccaagcgccaagtactgccaggtagtctgcacttaccacccaagatgtttactcttcactttcacggcggaatcaccatctgaggatcccacccgatggtttacttgtgtcctgaaagacagtgttacagaaacactgccaagagtgaataggacagcagcgatttctgggtattctttcaagcaatgctcacaccaaataagcgcttgcaacaaagacatttatgtggacctagacatgaagggcataaactataacagctcagttgccaagagtgctcaagaatgccaagaaagatgcacggatgacgtccactgccactttttcacgtacgccacaaggcagtttcccagcctggagcatcgtaacatttgtctactgaagcacacccaaacagggacaccaaccagaataacgaagctcgataaagtggtgtctggattttcactgaaatcctgtgcactttctaatctggcttgtattagggacattttccctaatacggtgtttgcagacagcaacatcgacagtgtcatggctcccgatgcttttgtctgtggccgaatctgcactcatcatcccggttgcttgttttttaccttcttttcccaggaatggcccaaagaatctcaaagaaatctttgtctccttaaaacatctgagagtggattgcccagtacacgcattaaaaagagcaaagctctttctggtttcagtctacaaagctgcaggcacagcatcccagtgttctgccattcttcattttaccatgacactgatttcttgggagaagaactggatattgttgctgcaaaaagtcacgaggcctgccagaaactgtgcaccaatgccgtccgctgccagttttttacctataccccagcccaagcatcctgcaacgaagggaagggcaagtgttacttaaagctttcttcaaacggatctccaactaaaatacttcacgggagaggaggcatctctggatacacattaaggttgtgtaaaatggataatgagtgtaccaccaaaatcaagcccaggatcgttggaggaactgcgtctgttcgtggtgagtggccgtggcaggtgaccctgcacacaacctcacccactcagagacacctgtgtggaggctccatcattggaaaccagtggatattaacagccgctcactgtttctatggggtagagtcacctaagattttgcgtgtctacagtggcattttaaatcaatctgaaataaaagaggacacatctttctttggggttcaagaaataataatccatgatcagtataaaatggcagaaagcgggtatgatattgccttgttgaaactggaaaccacagtgaattacacagattctcaacgacccatatgcctgccttccaaaggagatagaaatgtaatatacactgattgctgggtgactggatgggggtacagaaaactaagagacaaaatacaaaatactctccagaaagccaagatacccttagtgaccaacgaagagtgccagaagagatacagaggacataaaataacccataagatgatctgtgccggctacagggaaggagggaaggacgcttgcaagggagattcgggaggccctctgtcctgcaaacacaatgaggtctggcatctggtaggcatcacgagctggggcgaaggctgtgctcaaagggagcggccaggtgtttacaccaacgtggtcgagtacgtggactggattctggagaaaactcaagcagtgtgaatgggttcccaggggccattggagtccctgaaggacccaggatttgctgggagagggtgttgagttcactgtgccagcatgcttcctccacagtaacacgctgaaggggcttggtgtttgtaagaaaatgctagaagaaaacaaactgtcacaagttgttatgtccaaaactcccgttctatgatcgttgtagtttgtttgagcattcagtctctttgtttttgatcacgcttctatggagtccaagaattaccataaggcaatatttctgaagattactatataggcagatatagcagaaaataaccaagtagtggcagtggggatcaggcagaagaactggtaaaagaagccaccataaatagatttgttcgatgaaagatgaaaactggaagaaaggagaacaaagacagtcttcaccattttgcaggaatctacactctgcctatgtgaacacatttcttttgtaaagaaagaaattgattgcatttaatggcagattttcagaatagtcaggaattcttgtcatttccattttaaaatatatattaaaaaaaatcagttcgagtagacacgagctaagagtgaatgtgaagataacagaatttctgtgtggaagaggattacaagcagcaatttacctggaagtgataccttaggggcaatcttgaagatacactttcctgaaaaatgatttgtgatggattgtatatttatttaaaatatcttgggaggggaggctgatggagatagggagcatgctcaaacctccctaagacaagctgctgctgtgactatgggctcccaaagagctagatcgtatatttatttgacaaaaatcaccatagactgcatccatactacagagaaaaaacaattagggcgcaaatggatagttacagtaaagtcttcagcaagcagctgcctgtattctaagcactgggattttctgtttcgtgcaaatatttatctcattattgttgtgatctagttcaataacctagaatttgaattgtcaccacatagctttcaatctgtgccaacaactatacaattcatcaagtgtg

SEQ ID NO: 542 - protein, 625 aa, Homo sapiens
MIFLYQVVHFILFTSVSGECVTQLLKDTCFEGGDITTVFTPSAKYCQVVCTYHPRCLLFTFTAESPSEDPTRWFTCVLKDSVTETLPRVNRTAAISGYSFKQCSHQISACNKDIYVDLDMKGINYNSSVAKSAQECQERCTDDVHCHFFTYATRQFPSLEHRNICLLKHTQTGTPTRITKLDKVVSGFSLKSCALSNLACIRDIFPNTVFADSNIDSVMAPDAFVCGRICTHHPGCLFFTFFSQEWPKESQRNLCLLKTSESGLPSTRIKKSKALSGFSLQSCRHSIPVFCHSSFYHDTDFLGEELDIVAAKSHEACQKLCTNAVRCQFFTYTPAQASCNEGKGKCYLKLSSNGSPTKILHGRGGISGYTLRLCKMDNECTTKIKPRIVGGTASVRGEWPWQVTLHTTSPTQRHLCGGSIIGNQWILTAAHCFYGVESPKILRVYSGILNQSEIKEDTSFFGVQEIIIHDQYKMAESGYDIALLKLETTVNYTDSQRPICLPSKGDRNVIYTDCWVTGWGYRKLRDKIQNTLQKAKIPLVTNEECQKRYRGHKITHKMICAGYREGGKDACKGDSGGPLSCKHNEVWHLVGITSWGEGCAQRERPGVYTNVVEYVDWILEKTQAV

SEQ ID NO: 543 - DNA, 4236 bp, Homo sapiens
  CDS (135)..(1379)
ggtgggcggggggaggaggcggccctagcgccattttgtgggagcgaagcggtggctgggctgcgcttgggtccgtcgctgcttcggtgtccctgtcgggcttcccagcagcggcctagcgggaaaagtaaaagatgtctgaatatattcgggtaaccgaagatgagaacgatgagcccattgaaataccatcggaagacgatgggacggtgctgctctccacggttacagcccagtttccaggggcgtgtgggcttcgctacaggaatccagtgtctcagtgtatgagaggtgtccggctggtagaaggaattctgcatgccccagatgctggctggggaaatctggtgtatgttgtcaactatccaaaagataacaaaagaaaaatggatgagacagatgcttcatcagcagtgaaagtgaaaagagcagtccagaaaacatccgatttaatagtgttgggtctcccatggaaaacaaccgaacaggacctgaaagagtattttagtacctttggagaagttcttatggtgcaggtcaagaaagatcttaagactggtcattcaaaggggtttggctttgttcgttttacggaatatgaaacacaagtgaaagtaatgtcacagcgacatatgatagatggacgatggtgtgactgcaaacttcctaattctaagcaaagccaagatgagcctttgagaagcagaaaagtgtttgtggggcgctgtacagaggacatgactgaggatgagctgcgggagttcttctctcagtacggggatgtgatggatgtcttcatccccaagccattcagggcctttgcctttgttacatttgcagatgatcagattgcgcagtctctttgtggagaggacttgatcattaaaggaatcagcgttcatatatccaatgccgaacctaagcacaatagcaatagacagttagaaagaagtggaagatttggtggtaatccaggtggctttgggaatcagggtggatttggtaatagcagagggggtggagctggtttgggaaacaatcaaggtagtaatatgggtggtgggatgaactttggtgcgttcagcattaatccagccatgatggctgccgcccaggcagcactacagagcagttggggtatgatgggcatgttagccagccagcagaaccagtcaggcccatcgggtaataaccaaaaccaaggcaacatgcagagggagccaaaccaggccttcggttctggaaataactcttatagtggctctaattctggtgcagcaattggttggggatcagcatccaatgcagggtcgggcagtggttttaatggaggctttggctcaagcatggattctaagtcttctggctggggaatgtagacagtggggttgtggttggttggtatagaatggtgggaattcaaatttttctaaactcatggtaagtatattgtaaaatacatatgtactaagaattttcaaaattggtttgttcagtgtggagtatattcagcagtatttttgacatttttctttagaaaaaggaagagctaaaggaattttataagttttgttacatgaaaggttgaaatattgagtggttgaaagtgaactgctgtttgcctgattggtaaaccaacacactacaattgatatcaaaaggtttctcctgtaatattttatccctggacttgtcaagtgaattctttgcatgttcaaaacggaaaccattgattagaactacattctttaccccttgttttaatttgaaccccaccatatggatttttttccttaagaaaatctccttttaggagatcatggtgtcacagtgtttggttcttttgttttgttttttaacacttgtctcccctcatacacaaaagtacaatatgaagccttcatttaatctctgcagttcatctcatttcaaatgtttatggaagaagcacttcattgaaagtagtgctgtaaatattctgccataggaatactgtctacatgctttctcattcaagaattcgtcatcacgcatcacaggccgcgtctttgacggtgggtgtcccatttttatccgctactctttatttcatggagtcgtatcaacgctatgaacgcaaggctgtgatatggaaccagaaggctgtctgaacttttgaaaccttgtgtgggattgatggtggtgccgaggcatgaaaggctagtatgagcgagaaaaggagagagcgcgtgcagagacttggtggtgcataatggatattttttaacttggcgagatgtgtctctcaatcctgtggctttggtgagagagtgtgcagagagcaatgatagcaaataatgtacgaatgttttttgcattcaaaggacatccacatctgttggaagacttttaagtgagtttttgttcttagataacccacattagatgaatgtgttaagtgaaatgatacttgtactccccctacccctttgtcaactgctgtgaatgctgtatggtgtgtgttctcttctgttactgatatgtaagtgtggcaatgtgaactgaagctgatgggctgagaacatggactgagcttgtggtgtgctttgcaggaggacttgaagcagagttcaccagtgagctcaggtgtctcaaagaagggtggaagttctaatgtctgttagctacccataagaatgctgtttgctgcagttctgtgtcctgtgcttggatgctttttataagagttgtcattgttggaaattcttaaataaaactgatttaaataatatgtgtctttgttttgcagccctgaatgcaaagaattcatagcagttaattccccttttttgacccttttgagatggaactttcataaagtttcttggcagtagtttattttgcttcaaataaacttatttgaaaagttgtctcaagtcaaatggattcatcacctgtcatgcattgacacctgatacccagacttaattggtatttgttcttgcattggccaaagtgaaaatttttttttttcttttgaaatctagttttgaataagtctgggtgaccgcacctaaaatggtaagcagtaccctccggctttttcttagtgcctctgtgcatttgggtgatgttctatttacatggcctgtgtaaatctccattgggaagtcatgccttctaaaaagattcttatttgggggagtgggcaaaatgttgattattttctaatgctttgtagcaaagcatatcaattgaaaagggaatatcagcaccttcctagtttgggatttgaaaagtggaattaattgcagtagggataaagtagaagaaaccacaaattatcttgtgcctgaaatccattaagaggcctgatagctttaagaattagggtgggttgtctgtctggaagtgttaagtggaatgggctttgtcctccaggaggtgggggaatgtggtaacattgaatacagttgaataaaatcgcttacaaaactcacactctcacaatgcattgttaagtatgtaaaagcaataacattgattctctgttgtacttttttgtaactaattctgtgagagttgagctcattttctagttggaagaatgtgatatttgttgtgttggtagtttacctaatgcccttacctaattagattatgataaataggtttgtcattttgcaagttacataaacatttatcaatgaagtcatcctttagacttgtaatcgccacattgtttcattattcagtttcctctgtaaagggatcttgagttgttttaattttttttttctgcatctgaatctgcatgatttccaaaccctgtaccatctgaattttgcattttagcacttgcactattactcagcagcagtaacatggtaacacttaaaatggtactcggggacctccaaagactaaactgacaagccttcaaggagcccaggggtaagttaacttgtcaacggcatggtttaatcccttctttacacttgtgtaaatttcagttactggtcatagaaggctttcaatgttgagtggccttttattaacatgtttatggtactgcatagatacgggtatttattttaccctaagaagattttgaagtttaaaagtacttaaactatttggcaaagatttgtttttaaaaatctatttggtcaatctaaatgcattcattctaaaaaattttttgaaccagataaataaaatttttttttgacaccacaaaaaaaaaaaaaaaaaaaa

SEQ ID NO: 544 - protein, 414 aa, Homo sapiens
MSEYIRVTEDENDEPIEIPSEDDGTVLLSTVTAQFPGACGLRYRNPVSQCMRGVRLVEGILHAPDAGWGNLVYVVNYPKDNKRKMDETDASSAVKVKRAVQKTSDLIVLGLPWKTTEQDLKEYFSTFGEVLMVQVKKDLKTGHSKGFGFVRFTEYETQVKVMSQRHMIDGRWCDCKLPNSKQSQDEPLRSRKVFVGRCTEDMTEDELREFFSQYGDVMDVFIPKPFRAFAFVTFADDQIAQSLCGEDLIIKGISVHISNAEPKHNSNRQLERSGRFGGNPGGFGNQGGFGNSRGGGAGLGNNQGSNMGGGMNFGAFSINPAMMAAAQAALQSSWGMMGMLASQQNQSGPSGNNQNQGNMQREPNQAFGSGNNSYSGSNSGAAIGWGSASNAGSGSGFNGGFGSSMDSKSSGWGM

SEQ ID NO: 545 - DNA, 1550 bp, Homo sapiens
  CDS (81)..(947)
tcaacgcctgcctcccctcgagcgtcctcagcgcagccgccgcccgcggagccagcacgaacgagcccagcaccggccggatggagcgtccgcaacccgacagcatgccccaggatttgtcagaggccctgaaggaggccaccaaggaggtgcacacccaggcagagaatgctgagttcatgaggaactttcagaagggccaggtgacccgagacggcttcaagctggtgatggcctccctgtaccacatctatgtggccctggaggaggagattgagcgcaacaaggagagcccagtcttcgcccctgtctacttcccagaagagctgcaccgcaaggctgccctggagcaggacctggccttctggtacgggccccgctggcaggaggtcatcccctacacaccagccatgcagcgctatgtgaagcggctccacgaggtggggcgcacagagcccgagctgctggtggcccacgcctacacccgctacctgggtgacctgtctgggggccaggtgctcaaaaagattgcccagaaagccctggacctgcccagctctggcgagggcctggccttcttcaccttccccaacattgccagtgccaccaagttcaagcagctctaccgctcccgcatgaactccctggagatgactcccgcagtcaggcagagggtgatagaagaggccaagactgcgttcctgctcaacatccagctctttgaggagttgcaggagctgctgacccatgacaccaaggaccagagcccctcacgggcaccagggcttcgccagcgggccagcaacaaagtgcaagattctgcccccgtggagactcccagagggaagcccccactcaacacccgctcccaggctccgcttctccgatgggtccttacactcagctttctggtggcgacagttgctgtagggctttatgccatgtgaatgcaggcatgctggctcccagggccatgaactttgtccggtggaaggccttctttctagagagggaattctcttggctggcttccttaccgtgggcactgaaggctttcagggcctccagccctctcactgtgtccctctctctggaaaggaggaaggagcctatggcatcttccccaacgaaaagcacatccaggcaatggcctaaacttcagagggggcgaaggggtcagccctgcccttcagcatcctcagttcctgcagcagagcctggaagacaccctaatgtggcagctgtctcaaacctccaaaagccctgagtttcaagtatccttgttgacacggccatgaccactttccccgtgggccatggcaatttttacacaaacctgaaaagatgttgtgtcttgtgtttttgtcttatttttgttggagccactctgttcctggctcagcctcaaatgcagtatttttgttgtgttctgttgtttttatagcagggttggggtggtttttgagccatgcgtgggtggggagggaggtgtttaacggcactgtggccttggtctaacttttgtgtgaaataataaacaacattgtctg

SEQ ID NO: 546 - protein, 288 aa, Homo sapiens
MERPQPDSMPQDLSEALKEATKEVHTQAENAEFMRNFQKGQVTRDGFKLVMASLYHIYVALEEEIERNKESPVFAPVYFPEELHRKAALEQDLAFWYGPRWQEVIPYTPAMQRYVKRLHEVGRTEPELLVAHAYTRYLGDLSGGQVLKKIAQKALDLPSSGEGLAFFTFPNIASATKFKQLYRSRMNSLEMTPAVRQRVIEEAKTAFLLNIQLFEELQELLTHDTKDQSPSRAPGLRQRASNKVQDSAPVETPRGKPPLNTRSQAPLLRWVLTLSFLVATVAVGLYAM

SEQ ID NO: 547 - DNA, 3718 bp, Homo sapiens
  CDS (269)..(1735)
cgcctcaggtcggccgcggactacaaatggacgagagaggcggccgtccattagttagcggctccggagcaacgcagccgttgtccttgaggccgacgggcctgacgcgggcgggttgaacgcgctggtgaggcggtcacccgggctacggcggccggcagggggcagtggcggccgttgtctagggcccggaggtggggccgcgcgcctcgggcgctacgaacccggcaggcccacgcttggctgcggccgggtgcgggctgaggccatgggcgaccgcggcagctcccggcgccggaggacagggtcgcggccctcgagccacggcggcggcgggcctgcggcggcggaagaggaggtgcgggacgccgctgcgggccccgacgtgggagccgcgggggacgcgccagccccggcccccaacaaggacggagacgccggcgtgggcagcggccactgggagctgaggtgccatcgcctgcaggattctttattcagctctgacagtggcttcagcaactaccgtggcatcctgaactggtgtgtggtgatgctgatcttgagcaatgcccggttatttctggagaacctcatcaagtatggcatcctggtggaccccatccaggtggtttctctgttcctgaaggatccctatagctggcccgccccatgcctggttattgcggccaatgtctttgctgtggctgcattccaggttgagaagcgcctggcggtgggtgccctgacggagcaggcgggactgctgctgcacgtggccaacctggccaccattctgtgtttcccagcggctgtggtcttactggttgagtctatcactccagtgggctccctgctggcgctgatggcgcacaccatcctcttcctcaagctcttctcctaccgcgacgtcaactcatggtgccgcagggccagggccaaggctgcctctgcagggaagaaggccagcagtgctgctgccccgcacaccgtgagctacccggacaatctgacctaccgcgatctctactacttcctcttcgcccccaccttgtgctacgagctcaactttccccgctctccccgcatccggaagcgctttctgctgcgacggatccttgagatgctgttcttcacccagctccaggtggggctgatccagcagtggatggtccccaccatccagaactccatgaagcccttcaaggacatggactactcacgcatcatcgagcgcctcctgaagctggcggtccccaatcacctcatctggctcatcttcttctactggctcttccactcctgcctgaatgccgtggctgagctcatgcagtttggagaccgggagttctaccgggactggtggaactccgagtctgtcacctacttctggcagaactggaacatccctgtgcacaagtggtgcatcagacacttctacaagcccatgcttcgacggggcagcagcaagtggatggccaggacaggggtgttcctggcctcggccttcttccacgagtacctggtgagcgtccctctgcgaatgttccgcctctgggcgttcacgggcatgatggctcagatcccactggcctggttcgtgggccgctttttccagggcaactatggcaacgcagctgtgtggctgtcgctcatcatcggacagccaatagccgtcctcatgtacgtccacgactactacgtgctcaactatgaggccccagcggcagaggcctgagctgcacctgagggcctggcttctcactgccacctcacacccgctgccagagcccacctctcctcctaggcctcgagtgctggggatgggcctggctgcacagcatcctcctctggtcccagggaggcctctctgcccctatggggctctgtcctgcacccctcagggatggcgacagcaggccagacacagtctgatgccagctgggagtcttgctgaccctgccccgggtccgagggtgtcaataaagtgctgtccagtgacctcttcagcctgccaggggcctggggcctggtggggggtatggccacacccacaagggcgagtgccagagctgtgtggacagctgtcccaggacctgccggggagcagcagctccactgcagcagggcgggcatggccggtagggggagtgcaaggccaggcagacgcccccattccccacactcccctacctagaaaagctcagctcaggcgtcctctcctggtgctactcctgctgggtgtgcgggaatcggcactctggccctcagtgcaggatggtcaacttgcacccaccgtgctcagcttcagcttgggaagaggtcggccctgggtttgcgggaagtgggctccagccaggatggcccagggatgggcagtccacagggcctttctggtgtgggtctggtgagccgaggggctacggtacacaatggctatgtccatggctattcgccttggggcagggctcggtttggcagcctctttccttcacttggaacctgggcagccaggtgggctggtggctctcagctgccctccacgaggttggggcacccctgatccccaggcctgccttgccctctgctcttctggcaccaggctgggcagtgcagacagcgcagccctgcagccttcaggacaccttgttcccaggccctgcaatccaccaagctggatagatggggccccccttgatggtagcgggaggtcaggggtaaccccagggccctgctgctgccttaccttgctggggtgactgcttgattaaagaccccaagactggaccaggccctggtgtccccagacctgcagctatggcccaacaaggcaggtgtttgaggaggccctgcacagggtcccaggactgcaccaggggcctcatcagcaacctgctgaactggtggtgtgaggggagggtgggctcccttggtggtatcctccctctaccccagtgggggctggtgggccctgagatggaggcatctccttgggccctgctgaggatggcagtagtgggtgagctcctggtggggggatgggtgtggggccgactcctccatcccacatgggctcctgtgcctctccctatcagttggccagtggagctcgagaacaaactgttgctgccagataaagcagcaaagcctgctccactgcccagcgcaggcccccttcccttcctccaccaggctgagtggagaaccctaaagctacgggacaggctcccgttccccgtgcctacacagggtgctggctctggcagaaagacagtgtgcccgccccgcatcacctgtccgagtgcgaacaccttgggaagggggttcctggtggtcctgtgacaaccagagacccccagggccaaggtgaggcgcccacccctggtccctcaataaagaactgcaagcacatgctggtcctggggagtcgggcaggcacggagctagctgcaagcatccgtcttcccccaggaggccactgcagcccggcccttctgtgccctgggcccctcctcattgcagcaccacccaccgcaccaccctgggacagaggaaacacatggaggccatagcatagagcctgtctgtttatagatctctgcctgtcttgtccgtccatccactgtgtgtatatatctgtgtatctctgtggagcggggaacgggacagttgtgtaaaaatccaaaatacaattctgactatgaacaaaaaaaaaaaaaaa

SEQ ID NO: 548 - protein, 488 aa, Homo sapiens
MGDRGSSRRRRTGSRPSSHGGGGPAAAEEEVRDAAAGPDVGAAGDAPAPAPNKDGDAGVGSGHWELRCHRLQDSLFSSDSGFSNYRGILNWCVVMLILSNARLFLENLIKYGILVDPIQVVSLFLKDPYSWPAPCLVIAANVFAVAAFQVEKRLAVGALTEQAGLLLHVANLATILCFPAAVVLLVESITPVGSLLALMAHTILFLKLFSYRDVNSWCRRARAKAASAGKKASSAAAPHTVSYPDNLTYRDLYYFLFAPTLCYELNFPRSPRIRKRFLLRRILEMLFFTQLQVGLIQQWMVPTIQNSMKPFKDMDYSRIIERLLKLAVPNHLIWLIFFYWLFHSCLNAVAELMQFGDREFYRDWWNSESVTYFWQNWNIPVHKWCIRHFYKPMLRRGSSKWMARTGVFLASAFFHEYLVSVPLRMFRLWAFTGMMAQIPLAWFVGRFFQGNYGNAAVWLSLIIGQPIAVLMYVHDYYVLNYEAPAAEA

SEQ ID NO: 549 - DNA, 3083 bp, Homo sapiens
  CDS (59)..(2722)
atgttgtttttcctgtacctaagttcccgctgtaggtggtacctttgcagacggtgcgatgggggaagcagagaagtttcactacatctatagttgtgacctggatatcaacgtccagcttaagataggaagcttggaagggaagagagaacaaaagagttataaagctgtcctggaagacccaatgttgaagttctcaggactatatcaagagacatgctctgatctttatgttacttgtcaagtttttgcagaagggaagcctttggccttgccagtgagaacatcctacaaagcatttagtacaagatggaactggaatgaatggctgaaactaccagtaaaataccctgacctgcccaggaatgcccaagtggccctcaccatatgggatgtgtatggtcccggaaaagcagtgcctgtaggaggaacaacggtttcgctctttggaaaatacggcatgtttcgccaagggatgcatgacttgaaagtctggcctaatgtagaagcagatggatcagaacccacaaaaactcctggcagaacaagtagcactctctcagaagatcagatgagccgtcttgccaagctcaccaaagctcatcgacaaggacacatggtgaaagtagattggctggatagattgacatttagagaaatagaaatgataaatgagagtgaaaaacgaagttctaatttcatgtacctgatggttgaatttcgatgtgtcaagtgtgatgataaggaatatggtattgtttattatgaaaaggacggtgatgaatcatctccaattttaacaagttttgaattagtgaaagttcctgacccccagatgtctatggagaatttagttgagagcaaacaccacaagcttgcccggagtttaagaagtggaccttctgaccacgatctgaaacccaatgctgccacgagagatcagttaaatattattgtgagttatccaccaaccaagcaacttacatatgaagaacaagatcttgtttggaagtttagatattatcttacgaatcaagaaaaagccttgacaaaattcttgaaatgtgttaattgggatctacctcaagaggccaaacaggccttggaacttctgggaaaatggaagccgatggatgtagaggactccttggagctgttatcctctcattacaccaacccaactgtgaggcgttatgctgttgcccggttgcgacaggccgatgatgaggatttgttgatgtacctattacaattggtccaggctctcaaatatgaaaattttgatgatataaagaatggattggaacctaccaagaaggatagtcagagttcagtgtcagaaaatgtgtcaaattctggaataaattctgcagaaatagatagctcccaaattataaccagcccccttccttcagtctcttcacctcctcctgcatcaaaaacaaaagaagttccagatggcgaaaatctggaacaagatctctgtaccttcttgatatcgagagcctgcaaaaactcaacactggctaattatttatactggtatgtgatagtggaatgtgaagatcaagatactcagcagagagatccaaagacccatgagatgtacttgaacgtaatgagaagattcagccaagcattgttgaagggtgataagtctgtcagagttatgcgttctttgctggctgcacaacagacatttgtagatcggttggtgcatctaatgaaggcagtacaacgcgaaagtggaaatcgtaagaaaaagaatgagagactacaggcattgcttggagataatgaaaagatgaatttgtcagatgtggaacttatcccgttgcctttagaaccccaagtgaaaattagaggaataattccggaaacagctacactgtttaaaagtgcccttatgcctgcacagttgttttttaagacggaagatggaggcaaatatccagttatatttaagcatggagatgatttacgtcaagatcaacttattcttcaaatcatttcactcatggacaagctgttacggaaagaaaatctggacttgaaattgacaccttataaggtgttagccaccagtacaaaacatggcttcatgcagtttatccagtcagttcctgtggctgaagttcttgatacagagggaagcattcagaacttttttagaaaatatgcaccaagtgagaatgggccaaatgggattagtgctgaggtcatggacacttacgttaaaagctgtgctggatattgcgtgatcacctatatacttggagttggagacaggcacctggataaccttttgctaacaaaaacaggcaaactcttccacatagactttggatatattttgggtcgggatccaaagcctcttcctccaccaatgaagctgaataaagaaatggtagaaggaatggggggcacacagagtgagcagtaccaagagttccgtaaacagtgttacacggctttcctccacctgcgaaggtattctaatctgattttgaacttgttttccttgatggttgatgcaaacattccagatattgcacttgaaccagataaaactgtgaaaaaggttcaggataaattccgcttagacctgtcggatgaagaggctgtgcattacatgcagagtctgattgatgagagtgtccatgctctttttgctgcagtggtggaacagattcacaagtttgcccagtactggagaaaatgaaactgggattgacccatcaagatgcttggctcaataagaaaaccacgttaggagcaacctttgtatattggagacttcagagtaaccagcaaggaagagaaatcttaatcttcaagttaccatattttccaaatattacatggtacctgagttctgcttccttggatgtcattgcttaaatatagtcttgaagggcttgttttgaaatattgtatatattttttcaaatgtatacattgttaataaattaagaaatgagaaacattcttatttatgtacatgttatgagagttctggaggaagtaatatgttgaaatagtaaaacattttagtttttgagtttaaaaaaaaaaaaaaaaaa

SEQ ID NO: 550 - protein, 887 aa, Homo sapiens
MGEAEKFHYIYSCDLDINVQLKIGSLEGKREQKSYKAVLEDPMLKFSGLYQETCSDLYVTCQVFAEGKPLALPVRTSYKAFSTRWNWNEWLKLPVKYPDLPRNAQVALTIWDVYGPGKAVPVGGTTVSLFGKYGMFRQGMHDLKVWPNVEADGSEPTKTPGRTSSTLSEDQMSRLAKLTKAHRQGHMVKVDWLDRLTFREIEMINESEKRSSNFMYLMVEFRCVKCDDKEYGIVYYEKDGDESSPILTSFELVKVPDPQMSMENLVESKHHKLARSLRSGPSDHDLKPNAATRDQLNIIVSYPPTKQLTYEEQDLVWKFRYYLTNQEKALTKFLKCVNWDLPQEAKQALELLGKWKPMDVEDSLELLSSHYTNPTVRRYAVARLRQADDEDLLMYLLQLVQALKYENFDDIKNGLEPTKKDSQSSVSENVSNSGINSAEIDSSQIITSPLPSVSSPPPASKTKEVPDGENLEQDLCTFLISRACKNSTLANYLYWYVIVECEDQDTQQRDPKTHEMYLNVMRRFSQALLKGDKSVRVMRSLLAAQQTFVDRLVHLMKAVQRESGNRKKKNERLQALLGDNEKMNLSDVELIPLPLEPQVKIRGIIPETATLFKSALMPAQLFFKTEDGGKYPVIFKHGDDLRQDQLILQIISLMDKLLRKENLDLKLTPYKVLATSTKHGFMQFIQSVPVAEVLDTEGSIQNFFRKYAPSENGPNGISAEVMDTYVKSCAGYCVITYILGVGDRHLDNLLLTKTGKLFHIDFGYILGRDPKPLPPPMKLNKEMVEGMGGTQSEQYQEFRKQCYTAFLHLRRYSNLILNLFSLMVDANIPDIALEPDKTVKKVQDKFRLDLSDEEAVHYMQSLIDESVHALFAAVVEQIHKFAQYWRK

SEQ ID NO: 551 - DNA, 3448 bp, Homo sapiens
  CDS (312)..(2228)
gtccgcgcgcctcgctgcgatggcggcggcgccgagcacagtcaccccgctggcggcggagtcttcccctcaggaagctaccgtctctgccgcctcctcctcctcctacaccgcctgcgcggcagcggcggcggcggcggcggcggcggcagtaattgttcctgcctcctccgccacctccgcccctgcctgcccgcctgccggtggctgtggcgacggcggcggcggcggctttggcggctccactatggcggcggcggggagggggggcagtagttttaaagtagacacccgcccttgcctcagagaagatggagtcttgctctgtcaccaggctggagtgcagtggcgcaatctcggctcactgcagcctccacctcccgggttcaagcgactcccctgcctcagcctcccaaatagctgggactacagacgccatttggaatgaacaggaaaaggctgaactttttacagataagttttgtcaagtatgtggagtgatgctacagtttgaatcacaaagaatttcacattatgagggtgaaaaacatgctcaaaatgttagtttttattttcaaatgcatggggaacaaaatgaagtgcctggtaagaaaatgaagatgcatgttgagaattttcaggtgcataggtatgaaggagtggacaaaaacaaattttgtgatctctgcaacatgatgtttagctctccacttattgctcagtctcactatgtgggaaaggtccatgctaaaaaactgaagcaattaatggaggaacatgatcaggcatctccatcaggatttcaaccagagatggcatttagtatgagaacctatgtttgccatatttgtagtattgcttttacatctttagatatgttccggtcccacatgcaaggaagtgaacatcaaattaaagaatccattgttatcaatctagtgaagaattcaaggaagacacaagactcttaccaaaatgagtgtgcagattacatcaatgtgcagaaagccagaggactagaggccaagacttgtttcagaaagatggaagagagttctttggaaacccgtagatacagagaagtggtcgattccagacccagacatagaatgtttgaacaaagactcccatttgagactttccggacatacgcagcaccatacaatatttcacaagcaatggaaaagcagttacctcattcaaagaagacatatgactctttccaagatgaacttgaagattacatcaaagtacagaaagccagaggactagatccaaagacttgtttcagaaagatgagagagaactctgtggatactcatgggtacagagaaatggttgattctggacccagatcaagaatgtgtgagcaaagattttcacatgaggcttcccagacctaccaacgaccataccatatttcaccagtggaaagccagttacctcagtggctaccaacccattcaaagaggacatatgattctttccaagatgaacttgaagattacataaaagtgcagaaagccagaggactagagccaaaaacttgtttcagaaagataggagatagctctgtagaaacacacaggaacagagaaatggttgatgtcagacccagacatagaatgttggagcaaaagctcccatgtgagactttccagacctattcaggaccatatagtatttcacaagtagtggaaaaccagttacctcattgcttaccagctcatgatagcaaacagagactagattctattagctactgtcaactcaccagagactgtttcccagaaaaaccagtacccttgagccttaatcagcaagaaaataactctggctcatacagtgtagaatctgaagtttacaagcacctctcttcagaaaacaatactgctgaccatcaagcaggtcataaacagaaacatcagaagagaaaacgacacctagaagaaggcaaagaaaggccagagaaagagcagtccaagcataaaaggaaaaagagttatgaagatacagatttagacaaagacaagagcatcagacaaaggaaaagagaggaggatagagtcaaggtcagttcaggaaagcttaagcatcgaaaaaagaaaaaaagccatgatgtaccctccgagaaagaagaacgtaagcacaggaaagagaaaaagaaatctgttgaagaaaggacagaagaggaaatgctttgggatgagtctattcttggattttgaatgtttagttttgtttacccaaggttgaattgaaaaaaaaaaacagtcaatatggatttagaaaaaggaacacctgatgaagaaaaggagaggtagatacagtcagtgtcacttcaggacacttaggttttttttgtataaaaatttaaattgaattaaaagaaggaaaaaaaaagcccaaacttaacctctgagaaaagaacataagaactcaaggagaacataagagaaaaggaaacctgttacagaaaagacaagaatctgtgttttggaatgagtctattcttgggtattgaacttttagttttgtttgcccaaggattaattgaggaaatcagctaagaaaatggactttagacaaaagcaagaggatcagatgaagaaaaggagaggtagatacagtcagtgtcacttcaggaaagctatttaaaaaaacttgaaatttaattgaaagaagaaacaacaacaaaaaagcctaaacctagcctctgaacaacactaacatgagaacacaagaacttaagagaaaaagaaacctactcaagaaaagacagaagagacagtgatttgggatgagtctactctaggattttcaactttttagttttgttccttcaaagttgaaggaaaaaaagtttggttttataaaattcatgttattgtaatttttctaggtggatggctactttaatctctaaaaaagccaagtgaagtaaaagtattcagtatgccttttcctcaagttactttccttcattttcttaaaaaagaaaaaaaattattaaatgtttctcacatatctcacatataatgtaatttccctaaatgaagttgtctctacttctgctcatcaaattgctgtgatagtgaattatttattcatgggagataatttattttaaaggacagaattaccaagcgttacaaaatcagttctttccttggttttgtgttagtgttggtggtattttattgttgtttttctgtgtttatgtgtctcagctttctccaaggaatatgtatgaaataacttaaactgattttttctttgttaaatctaatttgcagtgtatttttgcattttctagttctgaaagtggaaaatgaaacagtctataataaacttagatgatatatagttttaaaacggtctcaaaaagtactgatataaggtcagtctatattctggaaatgtttatattaaagtgttttaatttcta

SEQ ID NO: 552 - protein, 638 aa, Homo sapiens
MESCSVTRLECSGAISAHCSLHLPGSSDSPASASQIAGTTDAIWNEQEKAELFTDKFCQVCGVMLQFESQRISHYEGEKHAQNVSFYFQMHGEQNEVPGKKMKMHVENFQVHRYEGVDKNKFCDLCNMMFSSPLIAQSHYVGKVHAKKLKQLMEEHDQASPSGFQPEMAFSMRTYVCHICSIAFTSLDMFRSHMQGSEHQIKESIVINLVKNSRKTQDSYQNECADYINVQKARGLEAKTCFRKMEESSLETRRYREVVDSRPRHRMFEQRLPFETFRTYAAPYNISQAMEKQLPHSKKTYDSFQDELEDYIKVQKARGLDPKTCFRKMRENSVDTHGYREMVDSGPRSRMCEQRFSHEASQTYQRPYHISPVESQLPQWLPTHSKRTYDSFQDELEDYIKVQKARGLEPKTCFRKIGDSSVETHRNREMVDVRPRHRMLEQKLPCETFQTYSGPYSISQVVENQLPHCLPAHDSKQRLDSISYCQLTRDCFPEKPVPLSLNQQENNSGSYSVESEVYKHLSSENNTADHQAGHKQKHQKRKRHLEEGKERPEKEQSKHKRKKSYEDTDLDKDKSIRQRKREEDRVKVSSGKLKHRKKKKSHDVPSEKEERKHRKEKKKSVEERTEEEMLWDESILGF

SEQ ID NO: 553 - DNA, 1332 bp, Homo sapiens
  CDS (43)..(1104)
ggggggtcttggcggccggaggaggagtaggtgcgggtgaagatggcggcagccgaggccgcgaactgcatcatggaggtgtcctgtggccaggcggaaagcagtgagaagcccaacgctgaggacatgacatccaaagattactactttgactcctacgcacactttggcatccacgaggagatgctgaaggacgaggtgcgcaccctcacttaccgcaactccatgtttcataaccggcacctcttcaaggacaaggtggtgctggacgtcggctcgggcaccggcatcctctgcatgtttgctgccaaggccggggcccgcaaggtcatcgggatcgagtgttccagtatctctgattatgcggtgaagatcgtcaaagccaacaagttagaccacgtggtgaccatcatcaaggggaaggtggaggaggtggagctcccagtggagaaggtggacatcatcatcagcgagtggatgggctactgcctcttctacgagtccatgctcaacaccgtgctctatgcccgggacaagtggctggcgcccgatggcctcatcttcccagaccgggccacgctgtatgtgacggccatcgaggaccggcagtacaaagactacaagatccactggtgggagaacgtgtatggcttcgacatgtcttgcatcaaagatgtggccattaaggagcccctagtggatgtcgtggaccccaaacagctggtcaccaacgcctgcctcataaaggaggtggacatctataccgtcaaggtggaagacctgaccttcacctccccgttctgcctgcaagtgaagcggaatgactacgtgcacgccctggtggcctacttcaacatcgagttcacacgctgccacaagaggaccggcttctccaccagccccgagtccccgtacacgcactggaagcagacggtgttctacatggaggactacctgaccgtgaagacgggcgaggagatcttcggcaccatcggcatgcggcccaacgccaagaacaaccgggacctggacttcaccatcgacctggacttcaagggccagctgtgcgagctgtcctgctccaccgactaccggatgcgctgaggcccggctctcccgccctgcacgagcccaggggctgagcgttcctaggcggtttcggggctcccccttcctctccctccctcccgcagaagggggttttaggggcctgggctggggggatggggagggcacatcgtgactgtgtttttcataacttatgtttttatatggttgcatttacgccaataaatcctcagctgggaaaaaaaaaaaaaaaaaaaaaaaaaa

SEQ ID NO: 554 - protein, 353 aa, Homo sapiens
MAAAEAANCIMEVSCGQAESSEKPNAEDMTSKDYYFDSYAHFGIHEEMLKDEVRTLTYRNSMFHNRHLFKDKVVLDVGSGTGILCMFAAKAGARKVIGIECSSISDYAVKIVKANKLDHVVTIIKGKVEEVELPVEKVDIIISEWMGYCLFYESMLNTVLYARDKWLAPDGLIFPDRATLYVTAIEDRQYKDYKIHWWENVYGFDMSCIKDVAIKEPLVDVVDPKQLVTNACLIKEVDIYTVKVEDLTFTSPFCLQVKRNDYVHALVAYFNIEFTRCHKRTGFSTSPESPYTHWKQTVFYMEDYLTVKTGEEIFGTIGMRPNAKNNRDLDFTIDLDFKGQLCELSCSTDYRMR

SEQ ID NO: 555 - DNA, 3333 bp, Homo sapiens
  CDS (245)..(2269)
ggaacttgcacagtccgcctcgggcagcccaaagctcctctgcccaccctggctcccagagccctccaaaacaaaagaccagagaagcactctccacccagcagccagacgcctccttcttgacgccagcccccaccctctgtctgctcgagcccaggaaaggcctgaaggaagaggccggggaaagagccctccctctctcccttgtccctccatccacccagcgccggcatctggagaccctatggcccgggctcactggggctgctgcccctggctggtcctcctctgtgcttgtgcctggggccacacaaagccagtggaccttggagggcaggatgtgagaaactgttccaccaaccccccttaccttccagttactgtggtcaataccacaatgtcactcacagccctccgccagcagatgcagacccagaatctctcagcctacatcatcccaggcacagatgctcacatgaacgagtacatcggccaacatgacgagaggcgtgcgtggattacaggctttacagggtctgcaggaactgcagtggtgactatgaagaaagcagctgtctggaccgacagtcgctactggactcaggctgagcggcagatggactgcaactgggagctccataaggaagttggcaccactcctattgtcacctggctcctcaccgagattcctgctggagggcgtgtgggttttgaccccttcctcttgtccattgacacctgggagagttatgatctggccctccaaggctctaacagacagctggtgtccatcacaaccaatcttgtggacctggtatggggatcagagaggccaccggttccaaatcaacccatttatgccctgcaggaggcattcacagggagcacttggcaggagaaagtatctggcgtccgaagccagatgcagaagcatcaaaaggtcccgactgccgtccttctgtcggcgcttgaggagacggcctggctcttcaaccttcgagccagtgacatcccctataaccccttcttctattcctacacgctgctcacagactcttctattaggttgtttgcaaacaagagtcgctttagctccgaaaccttgagctatctgaactccagttgcacaggccccatgtgtgtgcaaatcgaggattacagccaagttcgtgacagcatccaggcctactcattgggagatgtgaggatctggattgggaccagctataccatgtatgggatctatgaaatgatacccaaggagaaactcgtgacagacacctactccccagtgatgatgaccaaggcagtgaagaacagcaaggagcaggccctcctcaaggccagccacgtgcgggacgctgtggctgtgatccggtacttggtctggctggagaagaacgtgcccaaaggcacagtggatgagttctcgggggcagagatcgtggacaagttccgaggagaagaacagttctcctccggacccagttttgaaaccatctctgctagtggtctgaatgctgccctggcccactacagcccgaccaaggagctgaaccgcaagctgtcctcagatgagatgtacctgctggactctggggggcagtactgggacgggaccacagacatcaccagaacagtccactggggcaccccctctgccttccagaaggaggcatacacccgtgtgctgataggaaatattgacctgtccaggctcatctttcccgctgctacatcagggcgaatggtggaggcctttgcccgcagagccttgtgggatgctggtctcaattatggtcatgggacaggccacggcattggcaacttcctgtgtgtgcatgagtggccagtgggattccagtccaacaacatcgctatggccaagggcatgttcacttccattgaacctggttactataaggatggagaatttgggatccgtctcgaagatgtggctctcgtggtagaagcaaagaccaagtacccagggagctacctgacctttgaagtggtatcatttgtgccctatgaccggaacctcatcgatgtcagcctgctgtctcccgagcatctccagtacctgaatcgctactaccagaccatccgggagaaggtgggtccagagctgcagaggcgccagctactagaggagttcgagtggcttcaacagcacacagagcccctggccgccagggccccagacaccgcctcctgggcctctgtgttagtggtctccacccttgccatccttggctggagtgtctagaggctccagactctcctgttaaccctccatctagatggggggctcccttgcttagctcccctcaccctgcactgaacataccccaagagcccctgctggcccattgcctagaaacctttgcattcatcctccttctccaagacctatggagaaggtcccaggccccaggaacacagggcttcttggccccagatggcacctccctgcaccccggggttgtataccacaccctgggcccctaatcccaggccccgagataggaaagccagctagtctcttctcttctgtgatctcagtaggcctaacctataacctagcacagactgctacagctgctcccctcccgccaaacaaaaccccaagagagcaatgcccctaccacccaagggtgccatggtcccgggagagcccaaacctatcaccacctgttgggcatagccagagctgttcccacccagccagggcatgaaacatcaaccccccacatgtgaacccatcattcctaaaccctgggtaggctccatgccaagtaacagcagagggagttaagccataggaatttggctgtggagtaagagggaatgcggtgaggcactctggaatatgaccctaccagaggttggagaacaaacttgggcagccggaacccgtcactattctagacttccctggcattcgaggagccctttgaactttccaaagtgcagccacagctacaatgctgttaaatcctcccacattcttggatgccccttcaccttgtgtggacagtgtctggtttctccattttacagacaggaaaactgagcttcagacagggggtgggctttgcctaaggacacacaaatttggttgggagttgatggggccagatgagccagcattccagctctttcacccttcagcaacatgcagagtccctgagcccacctcccagccctctcctcattctctgaacccactgtggtgagaagaatttgctccggccaaattggccgttagccacctgggtccacatcctgctaagacgtttaaaacagcctaacaaagacacttgcctctgg

SEQ ID NO: 556 - protein, 674 aa, Homo sapiens
MARAHWGCCPWLVLLCACAWGHTKPVDLGGQDVRNCSTNPPYLPVTVVNTTMSLTALRQQMQTQNLSAYIIPGTDAHMNEYIGQHDERRAWITGFTGSAGTAVVTMKKAAVWTDSRYWTQAERQMDCNWELHKEVGTTPIVTWLLTEIPAGGRVGFDPFLLSIDTWESYDLALQGSNRQLVSITTNLVDLVWGSERPPVPNQPIYALQEAFTGSTWQEKVSGVRSQMQKHQKVPTAVLLSALEETAWLFNLRASDIPYNPFFYSYTLLTDSSIRLFANKSRFSSETLSYLNSSCTGPMCVQIEDYSQVRDSIQAYSLGDVRIWIGTSYTMYGIYEMIPKEKLVTDTYSPVMMTKAVKNSKEQALLKASHVRDAVAVIRYLVWLEKNVPKGTVDEFSGAEIVDKFRGEEQFSSGPSFETISASGLNAALAHYSPTKELNRKLSSDEMYLLDSGGQYWDGTTDITRTVHWGTPSAFQKEAYTRVLIGNIDLSRLIFPAATSGRMVEAFARRALWDAGLNYGHGTGHGIGNFLCVHEWPVGFQSNNIAMAKGMFTSIEPGYYKDGEFGIRLEDVALVVEAKTKYPGSYLTFEVVSFVPYDRNLIDVSLLSPEHLQYLNRYYQTIREKVGPELQRRQLLEEFEWLQQHTEPLAARAPDTASWASVLVVSTLAILGWSV

SEQ ID NO: 557 - DNA, 2938 bp, Homo sapiens
  CDS (249)..(1487)
gcgcgggccgctgtgaggcgcggcggcgagcgacgggcgcggggccgcggagcagcgagcgagcgagcgagcgcgaggccggagccccggccaggcccggccgacccgccgagcccgcgatgcgccccggggccgccccccggcgcagctgacgccccgcggccccgcgaagaccccggccggccggtcccggaggaagcggccgccgccgccgccgcccagcccagcgcccgcgccgcccgggcaccatggcggggaaggcggccgccccgggcaccgcggtgctgctggtcacggccaacgtgggctcgctcttcgacgacccagaaaacctgcagaagaactggcttcgggaattttaccaggtcgtgcacacacacaagccgcacttcatggccttgcactgtcaggagtttggagggaagaactacgaggcctccatgtcccacgtggacaagttcgtcaaagaactattgtcgagtgatgcgatgaaagaatataacagggctcgagtctacctggatgaaaactacaaatcccaggagcacttcacggcactaggaagcttttattttcttcatgagtccttaaaaaacatctaccagtttgactttaaagctaagaagtatagaaaggtcgctggcaaagagatctactcggataccttagagagcacgcccatgctggagaaggagaagtttccgcaggactacttccccgagtgcaaatggtcaagaaaaggcttcatccggacgaggtggtgcattgcagactgtgcctttgacttggtgaatatccatcttttccatgatgcttccaatctggtcgcctgggaaacaagcccttccgtgtactcgggaatccggcacaaggcactgggctacgtgctggacagaatcattgatcagcgattcgagaaggtttcctactttgtatttggtgatttcaacttccggctggattccaagtccgtcgtggagacgctctgcacaaaagccaccatgcagacggtccgggccgccgacaccaatgaagtggtgaagctcatatttcgtgagtcggacaacgaccggaaggttatgctccagttagaaaagaaactcttcgactacttcaaccaggaggttttccgagacaacaacggcaccgcgctcttggagtttgacaaggagttgtctgtctttaaggacagactgtatgaactggacatctcgttccctcccagctacccgtacagtgaggacgcccgccagggtgagcagtacatgaacacccggtgcccagcctggtgtgaccgcatcctcatgtccccgtctgccaaggagctggtgctgcggtcggagagcgaggagaaggttgtcacctatgaccacattgggcccaacgtctgcatgggagaccacaagcccgtgttcctggccttccgaatcatgcccggggcaggtaaacctcatgcccatgtgcacaagtgttgtgtcgtgcagtgacgtggtgggaagagatgccagcgccacgagaggacacttcgtgagcctccctgtagccgtggaccgaatacgcactcttgaaagctgcatcgagaacccgcccaagcgccacctgctagacggccagccccacacttcgcttcagcctccggaccattccggagcagcctcacatacctcactgtctcgtctgtctatgtgacattaagtagaaatattggttttttttttttttttttaaataagtcacagtcctgttgtcaaaactctaatagacagcaaagagggtctgtaccgtagacttcacagttttcagtttttaatgattgccagtggaggggcttcttcagcacagagaccccccactgtgtccagggaccccctctgccaggtggaggtgtgtccaggggctggggaagccgagacgggcactccctctgccggccggcagcgtggccctgagcatggcaagggggtctgtctctgccgatgctccttccgcggcactgactctgcgccgtgtcacatggtttttgaatcacactgcagctgctttccatttttatatatatataaatatatataaatatatactttttaaaaataatttataaatcttaccaaaacttatgctaaatatactttccagtatgaacgcacaggagagtcccatcagcaggcggcattggagtctaggagctcagctgtgtgtccatcaacacacaaattcgtaaaaaacacacatggcctcgccatcgtgggtaaaatcggccccacagcacgtctgcaccagcgggccgttactcccatgccgttcttctgtgtaatattaagaactgaatgtgaagtttatagctagcctgggtgtaccttttaagaattttgtaaaccgtttgtctgtcttttgttactgttttatggtgccaagtatcctacgttacaacaataatatcatgggagaaatagaaatagcctagtttgcttccaatagaaactgcttttaacatgggctgtatataaaaatattaaagagaaacaaaactgtacatttcctcattgctccgctacagacaacccatgtcataaccttgttgcaaatatttttctcctatagcagtaagtacagcattagaaggtgattagagagtctgttgatgaaacacaaatgtatgttttattgattttactttagaacactacagagttcctggaccgggtgaaggcattagctgggtgtttgtgtgggataaatactaccactgcaagtgactgctgtccgctgcggaatctgttcttggtggaagcacaggtccgtgtcgctgctgtggttgccgctgtccgcggttcaacacggagtccgccccgcgggtttcagctgttggtcgttctgaggggcctttggaagtgaccggtctggttcctaagcaataaaattgaccgtggtgaaaata

SEQ ID NO: 558 - protein, 412 aa, Homo sapiens
MAGKAAAPGTAVLLVTANVGSLFDDPENLQKNWLREFYQVVHTHKPHFMALHCQEFGGKNYEASMSHVDKFVKELLSSDAMKEYNRARVYLDENYKSQEHFTALGSFYFLHESLKNIYQFDFKAKKYRKVAGKEIYSDTLESTPMLEKEKFPQDYFPECKWSRKGFIRTRWCIADCAFDLVNIHLFHDASNLVAWETSPSVYSGIRHKALGYVLDRIIDQRFEKVSYFVFGDFNFRLDSKSVVETLCTKATMQTVRAADTNEVVKLIFRESDNDRKVMLQLEKKLFDYFNQEVFRDNNGTALLEFDKELSVFKDRLYELDISFPPSYPYSEDARQGEQYMNTRCPAWCDRILMSPSAKELVLRSESEEKVVTYDHIGPNVCMGDHKPVFLAFRIMPGAGKPHAHVHKCCVVQ

SEQ ID NO: 559 - DNA, 2778 bp, Homo sapiens
  CDS (694)..(2226)
agctccttcccgcggctctgcgatgcggcccgcagggtgacccgggcgggagtccggggacccgcgatcagccccggaggacggggtggggtcgccccaaacaggagcgccgggaccgctgggaccccgcactcggcgtccgccgccgccgggtagccgggcagtggaggtcccggatgaggcgacaatttttccggccccccctcccagtcccgccccacttccggggccgccactttcactttctcttccgccgaagccgctccccttgcgaagaactggggcctcccgggaggagagagggctttgccttgaaacccgggacgccaggggcgctcccgcaagtgggggtcctccgggacttggaacgccccggctgggtggtgtccgggcgtcctttccccgcttcttcccacctcggctggtcccgtttcctcctgcgcccagtgcggacctgtctcggcgcccgctgccctctcaccgccccacgcaggatcccggcctggtcaccgggcagtgtgatgcttcccgactgccgcggggacagcgaggcacacacagggcttgggccgcgccggaggccacacggcctggctgagttgctcctggtctcccgcctctcccaggcgacccggaggtagcatttcccaggaggcacggtcccccccagggggatgggcacagccacgccagatggacgagaagaccaagaaagcagaggaaatggccctgagcctcacccgagcagtggcgggcggggatgaacaggtggcaatgaagtgtgccatctggctggcagagcaacgggtgcccctgagtgtgcaactgaagcctgaggtctccccaacgcaggacatcaggctgtgggtgagcgtggaggatgctcagatgcacaccgtcaccatctggctcacagtgcgccctgatatgacagtggcgtctctcaaggacatggtttttctggactatggcttcccaccagtcttgcagcagtgggtgattgggcagcggctggcacgagaccaggagaccctgcactcccatggggtgcggcagaatggggacagtgcctacctctatctgctgtcagcccgcaacacctccctcaaccctcaggagctgcagcgggagcggcagctgcggatgctggaagatctgggcttcaaggacctcacgctgcagccgcggggccctctggagccaggccccccaaagcccggggtcccccaggaacccggacgggggcagccagatgcagtgcctgagcccccaccggtgggctggcagtgccccgggtgcaccttcatcaacaagcccacgcggcctggctgtgagatgtgctgccgggcgcgccccgaggcctaccaggtccccgcctcataccagcccgacgaggaggagcgagcgcgcctggcgggcgaggaggaggcgctgcgtcagtaccagcagcggaagcagcagcagcaggaggggaactacctgcagcacgtccagctggaccagaggagcctggtgctgaacacggagcccgccgagtgccccgtgtgctactcggtgctggcgcccggcgaggccgtggtgctgcgtgagtgtctgcacaccttctgcagggagtgcctgcagggcaccatccgcaacagccaggaggcggaggtctcctgccccttcattgacaacacctactcgtgctcgggcaagctgctggagagggagatcaaggcgctcctgacccctgaggattaccagcgatttctagacctgggcatctccattgctgaaaaccgcagtgccttcagctaccattgcaagaccccagattgcaagggatggtgcttctttgaggatgatgtcaatgagttcacctgccctgtgtgtttccacgtcaactgcctgctctgcaaggccatccatgagcagatgaactgcaaggagtatcaggaggacctggccctgcgggctcagaacgatgtggctgcccggcagacgacagagatgctgaaggtgatgctgcagcagggcgaggccatgcgctgcccccagtgccagatcgtggtacagaagaaggacggctgcgactggatccgctgcaccgtctgccacaccgagatctgctgggtcaccaagggcccacgctggggccctgggggcccaggagacaccagcgggggctgccgctgcagggtaaatgggattccttgccacccaagctgtcagaactgccactgagctaaagatggtggggccacatgctgacccagccccacatccacattctgttagaatgtagctcagggagcttcgtggacggccttgcttgctgtagcgttgtaggggccctgcctgcactgcggttgtccacggtcacatctgccccagtgcctttgtccttcccttggggcttgccggccagacttctctcccctgcggctcccacctctgcctgaccccagccttaaacatagcccctggccagaggccttgctgggtggagcctctgtgtgactccatactcctcccaccacaacactcatctgtcaaacaccaagcactctcagcctccccgccttcagctgtcagctttctggggctaacttctctgcctttgtggttggaggcctgaggcctcttggaactcttgctaacctgttcagagccaggaaggagactgcacagttttgaaagcacagcccgtcaggtccggctctgcgtctccctctctgcagcctgtgtaagctattataattaaaatggttttccgggaaaaaaaaaaaaaaaaaa

SEQ ID NO: 560 - protein, 510 aa, Homo sapiens
MDEKTKKAEEMALSLTRAVAGGDEQVAMKCAIWLAEQRVPLSVQLKPEVSPTQDIRLWVSVEDAQMHTVTIWLTVRPDMTVASLKDMVFLDYGFPPVLQQWVIGQRLARDQETLHSHGVRQNGDSAYLYLLSARNTSLNPQELQRERQLRMLEDLGFKDLTLQPRGPLEPGPPKPGVPQEPGRGQPDAVPEPPPVGWQCPGCTFINKPTRPGCEMCCRARPEAYQVPASYQPDEEERARLAGEEEALRQYQQRKQQQQEGNYLQHVQLDQRSLVLNTEPAECPVCYSVLAPGEAVVLRECLHTFCRECLQGTIRNSQEAEVSCPFIDNTYSCSGKLLEREIKALLTPEDYQRFLDLGISIAENRSAFSYHCKTPDCKGWCFFEDDVNEFTCPVCFHVNCLLCKAIHEQMNCKEYQEDLALRAQNDVAARQTTEMLKVMLQQGEAMRCPQCQIVVQKKDGCDWIRCTVCHTEICWVTKGPRWGPGGPGDTSGGCRCRVNGIPCHPSCQNCH

SEQ ID NO: 561 - DNA, 9410 bp, Homo sapiens
  CDS (34)..(8433)
cgccctcgagtggaggacgagaaggaaagcaccatgacgtccatccatttcgtggttcacccgctgccgggcaccgaggaccagctcaatgacaggttacgagaagtttctgagaagctgaacaaatataatttaaacagccacccccctttgaatgtattggaacaggctactattaaacagtgtgtggtgggaccaaatcatgctgcctttcttcttgaggatggtagagtttgcaggattggtttttcagtacagccagacagattggaattgggtaaacctgataataatgatgggtcaaagttgaacagcaactcgggggcagggaggacgtcaaggcctggtaggacaagcgactctccatggtttctctcaggttctgagactctaggcaggctggcaggcaacaccttaggaagccgctggagttctggagtgggtggaagtggtggaggatcctctggtaggtcatcagctggagctcgagattcccgccggcagactcgagttattcggacaggacgggatcgagggtctgggcttttgggcagtcagccccagccagttattccagcatctgtcattccagaggagctgatttcacaggcccaagttgttttacaaggcaaatccagaagtgtcattattcgagaacttcagagaacaaatcttgatgtgaaccttgctgtaaataatttacttagccgggatgatgaagatggagatgatggggatgatacagccagcgaatcttatttgcctggagaggatcttatgtctctccttgatgccgacattcattctgcccacccaagtgtcattattgatgcagatgccatgttttctgaagacattagctattttggttacccttcttttcgtcgttcatcactttccaggctaggctcatctcgagttctccttcttcccttagagagagactctgagctgttgcgtgaacgtgaatccgttttacgtttacgtgaacgaaggtggcttgatggagcctcatttgataatgaaaggggttctaccagcaaggaaggagagccaaacttggataagaagaatacacctgttcaaagtccagtatctctaggagaagatttgcagtggtggcctgataaggatggaacaaaattcatctgtattggggctctgtattctgaacttctggctgtcagcagtaaaggagaactttatcagtggaaatggagtgaatctgagccttacagaaatgcccagaatccttcattacatcatccacgagcaacatttttggggttaaccaatgaaaagatagtcctcctgtctgcaaatagcataagagcaactgtagctacagaaaataacaaggttgctacatgggtggatgaaactttaagttctgtggcttctaaattagagcacactgctcagacttactctgaacttcaaggagagcggatagtttctttacattgctgtgccctttacacctgcgctcagctggaaaacagtttatattggtggggtgtagttccttttagtcaaaggaagaaaatgttagagaaagctagagcaaaaaataaaaagcctaaatccagtgctggtatttcttcaatgccgaacatcactgttggtacccaggtatgcttgagaaataatcctctttatcatgctggagcagttgcattttcaattagtgctgggattcctaaagttggtgtcttaatggagtcagtttggaatatgaatgacagctgtagatttcaacttagatctcctgaaagcttgaaaaacatggaaaaagctagcaaaactactgaagctaagcctgaaagtaagcaggagccagtgaaaacagaaatgggtcctccaccatctccagcatccacgtgtagtgatgcatcctcaattgccagcagtgcatcaatgccatacaaacgacgacggtcaacccctgcaccaaaagaagaggaaaaggtgaatgaagagcagtggtctcttcgggaagtggtttttgtggaagatgtcaagaatgttcctgttggcaaggtgctaaaagtagatggtgcctatgttgctgtaaaatttccaggaacctccagtaatactaactgtcagaacagctctggtccagatgctgacccttcttctctcctgcaggattgtaggttacttagaattgatgaattgcaggttgtcaaaactggtggaacaccgaaggttcccgactgtttccaaaggactcctaaaaagctttgtatacctgaaaaaacagaaatattagcagtgaatgtagattccaaaggtgttcatgctgttctgaagactggaaattgggtacgatactgtatctttgatcttgctacaggaaaagcagaacaggaaaataattttcctacaagcagcattgctttccttggtcagaatgagaggaatgtagccattttcactgctggacaggaatctcccattattcttcgagatggaaatggtaccatctacccaatggccaaagattgcatgggaggaataagggatcccgattggctggatcttccacctattagtagtcttggaatgggtgtgcattctttaataaatcttcctgccaattcaacaatcaaaaagaaagctgctgttatcatcatggctgtagagaaacaaaccttaatgcaacacattctgcgctgtgactatgaggcctgtcgacaatatctaatgaatcttgagcaagcggttgttttagagcagaatctacagatgctgcagacattcatcagccacagatgtgatggaaatcgaaatattttgcatgcttgtgtatcagtttgctttccaaccagcaataaagaaactaaagaagaagaggaagcggagcgttctgaaagaaatacatttgcagaaaggctttctgctgttgaggccattgcaaatgcaatatcagttgtttcaagtaatggcccaggtaatcgggctggatcatcaagtagccgaagtttgagattacgggaaatgatgagacgttcgttgagagcagctggtttgggtagacatgaagctggagcttcatccagtgaccaccaggatccagtttcaccccccatagctccccctagttgggttcctgaccctcctgcgatggatcctgatggtgacattgattttatcctggcccccgctgtgggatctcttaccacagcagcaaccggtactggtcaaggaccaagcacctccactattccaggtccttccacagagccatctgtagtagaatccaaggatcgaaaggcgaatgctcattttatattgaaattgttatgtgacagtgtggttctccagccctatctacgagaacttctttctgccaaggatgcaagagggatgaccccatttatgtcagctgtaagtggccgagcttatcctgctgcaattaccatcttagaaactgctcagaaaattgcaaaagctgaaatatcctcaagtgaaaaagaggaagatgtattcatgggaatggtttgcccatcaggtaccaaccctgatgactctcctttatatgttttatgttgtaatgacacttgcagttttacatggactggagcagagcacattaaccaggatatttttgagtgtcgaacttgtggcttgctggagtcactgtgttgttgtacggaatgtgcaagggtttgtcataaaggtcatgattgcaaactcaaacggacatcaccaacagcctactgtgattgttgggagaaatgtaaatgtaaaactcttattgctggacagaaatctgctcgtcttgatctactttatcgcctgctcactgctactaatctggttactctgccaaacagcaggggagagcacctcttactattcttagtacagacagtcgcaaggcagacggtggagcattgtcaatacaggccacctcgaatcagggaagatcgtaaccgaaaaacagccagtcctgaagattcagatatgccagatcatgatttagagcctccaagatttgcccagcttgcattggagcgtgttctacaggactggaatgccttgaaatctatgattatgtttgggtcgcaggagaataaagaccctcttagtgccagcagtagaataggccatcttttgccagaagagcaagtatacctcaatcagcaaagtggcacaattcggctggactgtttcactcattgccttatagttaagtgtacagcagatattttgcttttagatactctactaggtacactagtgaaagaactccaaaacaaatatacacctggacgtagagaagaagctattgctgtgacaatgaggtttctacgttcagtggcaagagtttttgttattctgagtgtggaaatggcttcatccaaaaagaaaaacaactttattccacagccaattggaaaatgcaagcgtgtattccaagcattgctaccttacgctgtggaagaattgtgcaacgtagcagagtcactgattgttcctgtcagaatggggattgctcgtccaactgcaccatttaccctggctagtactagcatagatgccatgcagggcagtgaagaattattttcagtggaaccactaccaccacgaccatcatctgatcagtctagcagctccagtcagtctcagtcatcctacatcatcaggaatccacagcagaggcgcatcagccagtcacagcccgttcggggcagagatgaagaacaggatgatattgtttcagcagatgtggaagaggttgaggtggtggagggtgtggctggagaagaggatcatcatgatgaacaggaagaacacggggaagaaaatgctgaggcagagggacaacatgatgagcatgatgaagacgggagtgatatggagctggacttgttagcagcagctgaaacagaaagtgatagtgaaagtaaccacagcaaccaagataatgctagtgggcgcagaagcgttgtcactgcagcaactgctggttcagaagcaggagcaagcagtgttcctgccttcttttctgaagatgattctcaatcgaatgactcaagtgattctgatagcagtagtagtcagagtgacgacatagaacaggagacctttatgcttgatgagccattagaaagaaccacaaatagctcccatgccaatggtgctgcccaagctccccgttcaatgcagtgggctgtccgcaacacccagcatcagcgagcagccagtacagccccttccagtacatctacaccagcagcaagttcagcgggtttgatttatattgatccttcaaacttacgccggagtggtaccatcagtacaagtgctgcagctgcagcagctgctttggaagctagcaacgccagcagttacctaacatctgcaagcagtttagccagggcttacagcattgtcattagacaaatctcggacttgatgggccttattcctaagtataatcacctagtatactctcagattccagcagctgtgaaattgacttaccaagatgcagtaaacttacagaactatgtagaagaaaagcttattcccacttggaactggatggtcagtattatggattctactgaagctcaattacgttatggttctgcattagcatctgctggtgatcctggacatccaaatcatcctcttcacgcttctcagaattcagcgagaagagagaggatgactgcgcgagaagaagctagcttacgaacacttgaaggcagacgacgtgccaccttgcttagcgcccgtcaaggaatgatgtctgcacgaggagacttcctaaattatgctctgtctctaatgcggtctcataatgatgagcattctgatgttcttccagttttggatgtttgctcattgaagcatgtggcatatgtttttcaagcacttatatactggattaaggcaatgaatcagcagacaacattggatacacctcaactagaacgcaaaaggacgcgagaactcttggaactgggtattgataatgaagattcagaacatgaaaatgatgatgacaccaatcaaagtgctactttgaatgataaggatgatgactctcttcctgcagaaactggccaaaaccatccatttttccgacgttcagactccatgacattccttgggtgtatacccccaaatccatttgaagtgcctctggctgaagccatccccttggctgatcagccacatctgttgcagccaaatgctagaaaggaggatctttttggccgtccaagtcagggtctttattcttcatctgccagtagtgggaaatgtttaatggaggttacagtggatagaaactgcctagaggttcttccaacaaaaatgtcttatgctgccaatctgaaaaatgtaatgaacatgcaaaaccggcaaaaaaaagaaggggaagaacagcccgtgctgccagaagaaactgagagttcaaaaccagggccatctgctcatgatcttgctgcacaattaaaaagtagcttactagcagaaataggacttactgaaagtgaagggccacctctcacatctttcaggccacagtgtagctttatgggaatggttatttcccatgatatgctgctaggacgttggcgcctttctttagaactgttcggcagggtattcatggaagatgttggagcagaacctggatcaatcctaactgaattgggtggttttgaggtaaaagaatcaaaattccgcagagaaatggaaaaactgagaaaccagcagtcaagagatttgtcactagaggttgatcgggatcgagatcttctcattcagcagactatgaggcagcttaacaatcactttggtcgaagatgtgctactacaccaatggctgtacacagagtaaaagtcacatttaaggatgagccaggagagggcagtggtgtagcacgaagtttttatacagccattgcacaagcatttttatcaaatgaaaaattgccaaatctagagtgtatccaaaatgccaacaaaggcacccacacaagtttaatgcagagattaaggaaccgaggagagagagaccgggaaagggagagagaaagggaaatgaggaggagtagtggtttgcgagcaggttctcggagggaccgggatagagactttagaagacagctttccatcgacactaggccctttagaccagcctctgaagggaatcctagcgatgatcctgagcctttgccagcacatcggcaggcacttggagagaggctttatcctcgtgtacaagcaatgcaaccagcatttgcaagtaaaatcactggcatgttgttggaattatccccagctcagctgcttctccttctagcaagtgaggattctctgagagcaagagtggatgaggccatggaactcattattgcacatggacgggaaaatggagctgatagtatcctggatcttggattagtagactcctcagaaaaggtacagcaggaaaaccgaaagcgccatggctctagtcgaagtgtagtagatatggatttagatgatacagatgatggtgatgacaatgcccctttgttttaccaacctgggaaaagaggattttatactccaaggcctggcaagaacacagaagcaaggttgaattgtttcagaaacattggcaggattcttggactatgtctgttacagaatgaactatgtcctatcacattgaatagacatgtaattaaagtattgcttggtagaaaagtcaattggcatgattttgctttttttgatcctgtaatgtatgagagtttgcggcaactaatcctcgcgtctcagagttcagatgctgatgctgttttctcagcaatggatttggcatttgcaattgacctgtgtaaagaagaaggtggaggacaggttgaactcattcctaatggtgtaaatataccagtcactccacagaatgtatatgagtatgtgcggaaatacgcagaacacagaatgttggtagttgcagaacagcccttacatgcaatgaggaaaggtctactagatgtgcttccaaaaaattcattagaagatttaacggcagaagattttaggcttttggtaaatggctgcggtgaagtcaatgtgcaaatgctgatcagttttacctctttcaatgatgaatcaggagaaaatgctgagaagcttctgcagttcaagcgttggttctggtcaatagtagagaagatgagcatgacagaacgacaagatcttgtttacttttggacatcaagcccatcactgccagccagtgaagaaggattccagcctatgccctcaatcacaataagaccaccagatgaccaacatcttcctactgcaaatacttgcatttctcgactttacgtcccactctattcctctaaacagattctcaaacagaaattgttactcgccattaagaccaagaattttggttttgtgtagagtataaaaagtgtgtattgctgtgtaatattactagcaaattttgtagatttttttccatttgtctataaaagtttatggaagttaatgctgtcatacccccctggtggtaccttaaagagataaaatgcagacattccttgctgagtttatagcttaaaggcctaaggagcactagcaacatttggctatattggtttgctagtcaccaacttctgggtctaaccccagccaaagatgacagcagaacaacataatttacactgtgatttatctttttgctgagggggaaaaaatgtaaatgttctgaaaattcactgctgcctttgtggaaactgtttcagcaaaggttcttgtatagagggaatagggaatttcaaaataaaaaattaagtatgttctgtgttttcattttaactttttttatggtgtttaatttgtggttggctgcaactgtgtatcatgtatatggaacttgtaaaaaagttctcgacattcagatcttaagagatgaaatcacttttacctataaaaaccacttttattgcggtttgactgcattgagctctaggatattaaatgatatcactaatattttgcatgtaatttgctcatttgagtgagggcactttttttgtacatatgatggggccaatgcacaatacttttatcacaatcaactttttctttgtatccctatttcaatgagcagtcagtctcaagaggttactgcacttcagttctaactagacatttgtactaaggtatttcagttatgtaaactcagcctgggcactttctgataactgtaaaatgttttataagatcatgattattgaagatacattttggaaaattttaaatgttcgtgagcagcttaactacttttgtatctagccttttttaagtatcttgttacatttacttttttaaataaagaaattacagaagaaatgtcaagaaaaaaaaaaaaaaaa

SEQ ID NO: 562 - protein, 2799 aa, Homo sapiens
MTSIHFVVHPLPGTEDQLNDRLREVSEKLNKYNLNSHPPLNVLEQATIKQCVVGPNHAAFLLEDGRVCRIGFSVQPDRLELGKPDNNDGSKLNSNSGAGRTSRPGRTSDSPWFLSGSETLGRLAGNTLGSRWSSGVGGSGGGSSGRSSAGARDSRRQTRVIRTGRDRGSGLLGSQPQPVIPASVIPEELISQAQVVLQGKSRSVIIRELQRTNLDVNLAVNNLLSRDDEDGDDGDDTASESYLPGEDLMSLLDADIHSAHPSVIIDADAMFSEDISYFGYPSFRRSSLSRLGSSRVLLLPLERDSELLRERESVLRLRERRWLDGASFDNERGSTSKEGEPNLDKKNTPVQSPVSLGEDLQWWPDKDGTKFICIGALYSELLAVSSKGELYQWKWSESEPYRNAQNPSLHHPRATFLGLTNEKIVLLSANSIRATVATENNKVATWVDETLSSVASKLEHTAQTYSELQGERIVSLHCCALYTCAQLENSLYWWGVVPFSQRKKMLEKARAKNKKPKSSAGISSMPNITVGTQVCLRNNPLYHAGAVAFSISAGIPKVGVLMESVWNMNDSCRFQLRSPESLKNMEKASKTTEAKPESKQEPVKTEMGPPPSPASTCSDASSIASSASMPYKRRRSTPAPKEEEKVNEEQWSLREVVFVEDVKNVPVGKVLKVDGAYVAVKFPGTSSNTNCQNSSGPDADPSSLLQDCRLLRIDELQVVKTGGTPKVPDCFQRTPKKLCIPEKTEILAVNVDSKGVHAVLKTGNWVRYCIFDLATGKAEQENNFPTSSIAFLGQNERNVAIFTAGQESPIILRDGNGTIYPMAKDCMGGIRDPDWLDLPPISSLGMGVHSLINLPANSTIKKKAAVIIMAVEKQTLMQHILRCDYEACRQYLMNLEQAVVLEQNLQMLQTFISHRCDGNRNILHACVSVCFPTSNKETKEEEEAERSERNTFAERLSAVEAIANAISVVSSNGPGNRAGSSSSRSLRLREMMRRSLRAAGLGRHEAGASSSDHQDPVSPPIAPPSWVPDPPAMDPDGDIDFILAPAVGSLTTAATGTGQGPSTSTIPGPSTEPSVVESKDRKANAHFILKLLCDSVVLQPYLRELLSAKDARGMTPFMSAVSGRAYPAAITILETAQKIAKAEISSSEKEEDVFMGMVCPSGTNPDDSPLYVLCCNDTCSFTWTGAEHINQDIFECRTCGLLESLCCCTECARVCHKGHDCKLKRTSPTAYCDCWEKCKCKTLIAGQKSARLDLLYRLLTATNLVTLPNSRGEHLLLFLVQTVARQTVEHCQYRPPRIREDRNRKTASPEDSDMPDHDLEPPRFAQLALERVLQDWNALKSMIMFGSQENKDPLSASSRIGHLLPEEQVYLNQQSGTIRLDCFTHCLIVKCTADILLLDTLLGTLVKELQNKYTPGRREEAIAVTMRFLRSVARVFVILSVEMASSKKKNNFIPQPIGKCKRVFQALLPYAVEELCNVAESLIVPVRMGIARPTAPFTLASTSIDAMQGSEELFSVEPLPPRPSSDQSSSSSQSQSSYIIRNPQQRRISQSQPVRGRDEEQDDIVSADVEEVEVVEGVAGEEDHHDEQEEHGEENAEAEGQHDEHDEDGSDMELDLLAAAETESDSESNHSNQDNASGRRSVVTAATAGSEAGASSVPAFFSEDDSQSNDSSDSDSSSSQSDDIEQETFMLDEPLERTTNSSHANGAAQAPRSMQWAVRNTQHQRAASTAPSSTSTPAASSAGLIYIDPSNLRRSGTISTSAAAAAAALEASNASSYLTSASSLARAYSIVIRQISDLMGLIPKYNHLVYSQIPAAVKLTYQDAVNLQNYVEEKLIPTWNWMVSIMDSTEAQLRYGSALASAGDPGHPNHPLHASQNSARRERMTAREEASLRTLEGRRRATLLSARQGMMSARGDFLNYALSLMRSHNDEHSDVLPVLDVCSLKHVAYVFQALIYWIKAMNQQTTLDTPQLERKRTRELLELGIDNEDSEHENDDDTNQSATLNDKDDDSLPAETGQNHPFFRRSDSMTFLGCIPPNPFEVPLAEAIPLADQPHLLQPNARKEDLFGRPSQGLYSSSASSGKCLMEVTVDRNCLEVLPTKMSYAANLKNVMNMQNRQKKEGEEQPVLPEETESSKPGPSAHDLAAQLKSSLLAEIGLTESEGPPLTSFRPQCSFMGMVISHDMLLGRWRLSLELFGRVFMEDVGAEPGSILTELGGFEVKESKFRREMEKLRNQQSRDLSLEVDRDRDLLIQQTMRQLNNHFGRRCATTPMAVHRVKVTFKDEPGEGSGVARSFYTAIAQAFLSNEKLPNLECIQNANKGTHTSLMQRLRNRGERDREREREREMRRSSGLRAGSRRDRDRDFRRQLSIDTRPFRPASEGNPSDDPEPLPAHRQALGERLYPRVQAMQPAFASKITGMLLELSPAQLLLLLASEDSLRARVDEAMELIIAHGRENGADSILDLGLVDSSEKVQQENRKRHGSSRSVVDMDLDDTDDGDDNAPLFYQPGKRGFYTPRPGKNTEARLNCFRNIGRILGLCLLQNELCPITLNRHVIKVLLGRKVNWHDFAFFDPVMYESLRQLILASQSSDADAVFSAMDLAFAIDLCKEEGGGQVELIPNGVNIPVTPQNVYEYVRKYAEHRMLVVAEQPLHAMRKGLLDVLPKNSLEDLTAEDFRLLVNGCGEVNVQMLISFTSFNDESGENAEKLLQFKRWFWSIVEKMSMTERQDLVYFWTSSPSLPASEEGFQPMPSITIRPPDDQHLPTANTCISRLYVPLYSSKQILKQKLLLAIKTKNFGFV

SEQ ID NO: 563 - DNA, 3231 bp, Homo sapiens
  CDS (77)..(3112)
cccggccgggtctgggggcggggcgtttgcccggcctttccagggccggggaaccccaggaggaagctgctgagccatgggcgcctacgcgcgggcttcgggggtctgcgctcgcggctgcctggactcagcaggcccctggaccatgtcccgcgccctgcggccaccgctcccgcctctctgctttttccttttgttgctggcggctgccggtgctcgggccgggggatacgagacatgccccacagtgcagccgaacatgctgaacgtgcacctgctgcctcacacacatgatgacgtgggctggctcaaaaccgtggaccagtacttttatggaatcaagaatgacatccagcacgccggtgtgcagtacatcctggactcggtcatctctgccttgctggcagatcccacccgtcgcttcatttacgtggagattgccttcttctcccgttggtggcaccagcagacaaatgccacacaggaagtcgtgcgagaccttgtgcgccaggggcgcctggagttcgccaatggtggctgggtgatgaacgatgaggcagccacccactacggtgccatcgtggaccagatgacacttgggctgcgctttctggaggacacatttggcaatgatgggcgaccccgtgtggcctggcacattgaccccttcggccactctcgggagcaggcctcgctgtttgcgcagatgggcttcgacggcttcttctttgggcgccttgattatcaagataagtgggtacggatgcagaagctggagatggagcaggtgtggcgggccagcaccagcctgaagcccccgaccgcggacctcttcactggtgtgcttcccaatggttacaacccgccaaggaatctgtgctgggatgtgctgtgtgtcgatcagccgctggtggaggaccctcgcagccccgagtacaacgccaaggagctggtcgattacttcctaaatgtggccactgcccagggccggtattaccgcaccaaccacactgtgatgaccatgggctcggacttccaatatgagaatgccaacatgtggttcaagaaccttgacaagctcatccggctggtaaatgcgcagcaggcaaaaggaagcagtgtccatgttctctactccacccccgcttgttacctctgggagctgaacaaggccaacctcacctggtcagtgaaacatgacgacttcttcccttacgcggatggcccccaccagttctggaccggttacttttccagtcggccggccctcaaacgctacgagcgcctcagctacaacttcctgcaggtgtgcaaccagctggaggcgctggtgggcctggcggccaacgtgggaccctatggctccggagacagtgcacccctcaatgaggcgatggctgtgctccagcatcacgacgccgtcagcggcacctcccgccagcacgtggccaacgactacgcgcgccagcttgcggcaggctgggggccttgcgaggttcttctgagcaacgcgctggcgcggctcagaggcttcaaagatcacttcaccttttgccaacagctaaacatcagcatctgcccgctcagccagacggcggcgcgcttccaggtcatcgtttataatcccctggggcggaaggtgaattggatggtacggctgccggtcagcgaaggcgttttcgttgtgaaggaccccaatggcaggacagtgcccagcgatgtggtaatatttcccagctcagacagccaggcgcaccctccggagctgctgttctcagcctcactgcccgccctgggcttcagcacctattcagtagcccaggtgcctcgctggaagccccaggcccgcgcaccacagcccatccccagaagatcctggtcccctgctttaaccatcgaaaatgagcacatccgggcaacgtttgatcctgacacagggctgttgatggagattatgaacatgaatcagcaactcctgctgcctgttcgccagaccttcttctggtacaacgccagtataggtgacaacgaaagtgaccaggcctcaggtgcctacatcttcagacccaaccaacagaaaccgctgcctgtgagccgctgggctcagatccacctggtgaagacacccttggtgcaggaggtgcaccagaacttctcagcttggtgttcccaggtggttcgcctgtacccaggacagcggcacctggagctagagtggtcggtggggccgatacctgtgggcgacacctgggggaaggaggtcatcagccgttttgacacaccgctggagacaaagggacgcttctacacagacagcaatggccgggagatcctggagaggaggcgggattatcgacccacctggaaactgaaccagacggagcccgtggcaggaaactactatccagtcaacacccggatttacatcacggatggaaacatgcagctgactgtgctgactgaccgctcccaggggggcagcagcctgagagatggctcgctggagctcatggtgcaccgaaggctgctgaaggacgatggacgcggagtatcggagccactaatggagaacgggtcgggggcgtgggtgcgagggcgccacctggtgctgctggacacagcccaggctgcagccgccggacaccggctcctggcggagcaggaggtcctggcccctcaggtggtgctggccccgggtggcggcgccgcctacaatctcggggctcctccgcgcacgcagttctcagggctgcgcagggacctgccgccctcggtgcacctgctcacgctggccagctggggccccgaaatggtgctgctgcgcttggagcaccagtttgccgtaggagaggattccggacgtaacctgagcgcccccgttaccttgaacttgagggacctgttctccaccttcaccatcacccgcctgcaggagaccacgctggtggccaaccagctccgcgaggcagcctccaggctcaagtggacaacaaacacaggccccacaccccaccaaactccgtaccagctggacccggccaacatcacgctggaacccatggaaatccgcactttcctggcctcagttcaatggaaggaggtggatggttaggtctgctgggatgggccctccaagcccaagcctcctgctccgggggcagaccagactctgactctcctcttggggctgctgccattaaaacgctactactaagactcaggtcaaaaaaa

SEQ ID NO: 564 - protein, 1011 aa, Homo sapiens
MGAYARASGVCARGCLDSAGPWTMSRALRPPLPPLCFFLLLLAAAGARAGGYETCPTVQPNMLNVHLLPHTHDDVGWLKTVDQYFYGIKNDIQHAGVQYILDSVISALLADPTRRFIYVEIAFFSRWWHQQTNATQEVVRDLVRQGRLEFANGGWVMNDEAATHYGAIVDQMTLGLRFLEDTFGNDGRPRVAWHIDPFGHSREQASLFAQMGFDGFFFGRLDYQDKWVRMQKLEMEQVWRASTSLKPPTADLFTGVLPNGYNPPRNLCWDVLCVDQPLVEDPRSPEYNAKELVDYFLNVATAQGRYYRTNHTVMTMGSDFQYENANMWFKNLDKLIRLVNAQQAKGSSVHVLYSTPACYLWELNKANLTWSVKHDDFFPYADGPHQFWTGYFSSRPALKRYERLSYNFLQVCNQLEALVGLAANVGPYGSGDSAPLNEAMAVLQHHDAVSGTSRQHVANDYARQLAAGWGPCEVLLSNALARLRGFKDHFTFCQQLNISICPLSQTAARFQVIVYNPLGRKVNWMVRLPVSEGVFVVKDPNGRTVPSDVVIFPSSDSQAHPPELLFSASLPALGFSTYSVAQVPRWKPQARAPQPIPRRSWSPALTIENEHIRATFDPDTGLLMEIMNMNQQLLLPVRQTFFWYNASIGDNESDQASGAYIFRPNQQKPLPVSRWAQIHLVKTPLVQEVHQNFSAWCSQVVRLYPGQRHLELEWSVGPIPVGDTWGKEVISRFDTPLETKGRFYTDSNGREILERRRDYRPTWKLNQTEPVAGNYYPVNTRIYITDGNMQLTVLTDRSQGGSSLRDGSLELMVHRRLLKDDGRGVSEPLMENGSGAWVRGRHLVLLDTAQAAAAGHRLLAEQEVLAPQVVLAPGGGAAYNLGAPPRTQFSGLRRDLPPSVHLLTLASWGPEMVLLRLEHQFAVGEDSGRNLSAPVTLNLRDLFSTFTITRLQETTLVANQLREAASRLKWTTNTGPTPHQTPYQLDPANITLEPMEIRTFLASVQWKEVDG

SEQ ID NO: 565 - DNA, 1519 bp, Homo sapiens
  CDS (514)..(1125)
ggcggttacctcatcgccgcctccgggaggccccgctcgctcgcgccggcggctggggcggcgactccaggcgcggaagcgagagaaggatagaggcacagaggctccgggaggcagcgctgccccccgcgccccgcaccgctgcgggacccgcgccgcgagaggggcggacttcggcgcctcgcgcgtccgccggcgcctgggttggcgctgcggggcggaggcggtgtctgagcgccgctccggctctgctctctctcgagcttcggcacccgcccgagccgctcgcgcgcccgccacctgtctgcccactcggctgtctgtctgccctcccgccgccagctcctgcctcgggcctgccctctccggtctcggtgctccgaggggcgacgagaagcgcgacggggccgtggcgcaccgggcagggcgcgcggggcgcacggcctgggggcgcacggtgcggcgccggcccatgaggctttccagcgcggggagcggcagcgccggccggccatggggggtagcctgcgggtggccgttctaggcgccccgggcgtgggcaagacggccatcatccgccagttcctgttcggtgactaccccgagcgccaccggcccacggacgggccgcgcctctaccgacccgcggtgctgctcgacggcgccgtctacgacttgagcatccgcgacggcgacgtcgctggccccggctcgagccccgggggtccggaggagtggccagacgctaaggactggagcttgcaggacacggacgccttcgtgctcgtctacgacatctgcagcccggacagtttcgactacgtgaaggccctgcggcagcgcatcgcggagaccaggccggcgggcgcgcccgaagcgcccatcctcgtggtaggcaacaagcgggacaggcagcggctgcgcttcggaccgcggcgcgcgctggccgccctagtgcgcaggggctggcgctgcggctacctcgagtgctccgccaagtacaactggcacgtgctgcgtctcttccgcgagctgctgcgctgcgctctggtgcgcgcgcgccctgcacacccggccctgcgcctgcagggggcgctgcatcccgcgcgctgcagcctcatgtgacccgatcggacagtgccatccatgggccccaccttgtgactgggacaatcagggacctggattggacgggatcgcccaacttcactgggactggacagggaagtctccgccctgattggatgaggaaagctccaacccagtctcctaagcgactggcccccttttgaacctcattggacccaaccaggtcccaagctccattggagatgaccagtcctttctgggacctcaatgggtcacaatcccattggatggaaaggacttggctatgaacttgactggaaacacgcagcctgctcctggagcttcactggacatattctttatgccacacctaccacgggataataaaagggaaaataatttgaaaaaaaaaaacaaaaaaaaaaaaaaa

SEQ ID NO: 566 - protein, 203 aa, Homo sapiens
MGGSLRVAVLGAPGVGKTAIIRQFLFGDYPERHRPTDGPRLYRPAVLLDGAVYDLSIRDGDVAGPGSSPGGPEEWPDAKDWSLQDTDAFVLVYDICSPDSFDYVKALRQRIAETRPAGAPEAPILVVGNKRDRQRLRFGPRRALAALVRRGWRCGYLECSAKYNWHVLRLFRELLRCALVRARPAHPALRLQGALHPARCSLM

SEQ ID NO: 567 - DNA, 7840 bp, Homo sapiens
  CDS (14)..(2140)
aacgggaaacaagatggcggctgcaggtccgagtactcgggcctcttccgcggcggcagcagccgctctgagtcggcggggccggcggggccgctgtgacgagacggcggcagctaagactggggccccaggcccggcttctggaccttcgctgttggtgttgtcgccgccgttgctgcagccgccgctgccgccgcggccggaggaatcgggctgcgccgggtgcctggagccccccggagaagcagcggccctgccgtgcggccactcgctttgccgaggctgcgcccaacgcgccgccgacgcggcgggcccgggttgccctcgctgccgcgcccgcggcccaggctgggcccgccgtcgggcccgcgacgacggccaggccgactcagaggtgctgggcgagtgcgcccgccgcagccaacccgagcgctgccgcccgcgccgggacgggggcgcggctgccgcggggcccaggccagagcaggagccgcgtgccgcgcctgcggagccagactttatattcagagcaccaatcaaattaagcaagcctggggaacttcgtgaggaatatgaaagcttgagaaagctgagagaagaaaagttacaagaggaaaaaccctctgaagatcaaatccacaagctgttaccagaggatacagaaacagggaaaaggaaaatggatgaacagaaaaaaagagatgaaccattagtactgaaaacaaatctggaacgttgtcctgcacgtctctcagattcagagaatgaagaaccttctcgaggccagatgacacagacacatcgctcggcatttgtttccaagaacaactcctactccttagctttcctggcagggaagctaaactccaaggtggaaaggagtcagagctgtagtgacacagcccaggaaagagcgaagagcagagtcagagcagttccaggcaacaaagccaaggtcacaactatgactccagcctccaaccccatcattggtgtcctcttgtcaactcaaaacaaccgctgcgtctcggcccctgacttaaccatcgaaaagcgtctacccttcagctccctttcatccttggcttccctgcataagccagagcgttctgtcagccctgagagcaatgacagcatctccgaagaactaaaccatttcaagcccattgtctgctcaccatgtactcctcccaagagactccctgatggccgtgtgctaagtcctctcatcatcaaatcaactccacgcaacctaaacagaagcctgcagaagcagacttcttatgaggccagtccacggatcctcaaaaagtgggaacagatctttcaggagcggcagatcaaaaagaccctttcaaaagccactcttacctctctggctcctgaaatgggggaagagttactaggctctgaaggtatccattctagcaaggagaagccacttgtggctgtaaatacaagattatctggtgggcaggtcctctctgagtatactggacccacctctgctgatcttgatcatttcccctctgttagccaaacaaaagcagaacaggacagtgataataaaagtagcactgagatcccactggaaacctgctgttcctcagaactcaaagggggaggcagtgggacttctttggagagggagcagtttgaggggttagggtcaactccagatgccaagttagacaaaacctgtataagcagagccatgaaaatcaccacagttaattcagtgctaccccaaaacagtgttttgggtggagtcctcaaaacaaagcaacaattgaagacattaaatcattttgatctgactaatggtgttctagttgagagcctaagtgaagagccacttccttctttgcgtcgaggccggaaaagacactgcaagaccaagcacttagaacaaaatggctcccttaaaaaactgcgacaaaccagtggggaggtgggtctggccccaacagacccagtcctgcgagagatggagcagaagcttcagcaagaggaagaagaccgacagttggctctgcagttgcagcgcatgttcgacaatgagaggcggactgtgagccggcgaaaaggaagtgtggatcagtatctcctacggtccagcaacatggccggggccaagtagcacctaatgaagtgttacctatttttaaaaggtcttaggccttgatcatttatcctgaagagctgagtgttctcactttggttttattttaatggcaaaacactgtctaatatggttctgagaggttccagggcctttgtagtcaatatccaagggaaaagcatctccgtttctctgtgacccaggccagaagcctgagtgacccatccctaagggcttctgggccaaacctggcagcacccactgggaatgagatttggaacggcctcaggagcataatggccacagttagtaatggtaaagaggggataccttcttaaactgatagacttcctgacttctttcagcagggtattgttttaaatcagccttgcagataaaaattaattccatctttttcagacaagtgaacaatttagttccttggcagatccaaaatgatagatggttatgttacgctttctgctgtcccttgccaaaaataagtaaatatatcagttaagattatgcctttacaaaagttaatttacattctctgtttaaaaaataatatttggtgaatgctatatagttgacagagcacatttacagaccttattaatttagtctttccaagagacctctcatgtaactggcattagccccatttttagatgatgaaactgcagtgcagatgttctggttctctcaactaccaagtggcataacccatggattttctaaaggtttcccaaatagatcacaacctaagggtgtgccaggggagcctaggggaagctaggctgggcattgaacactgatagtgcagaatccacatgcaaacaagatcgacagggtggataaacatatatgtgcattatccccatcccccacagtttagagccttctgcttttctgggggtttcagcctatgagacaaactataatcaggcttcattattacttttcaaatggccaagggttatctgcaatgttgatctaaaatcctaaaaaatcaccctgaagtcaggcaaggaacaatacttaaactccatactatggaaacaaggtatctagctggatgcagctggtaaattcagtcccatggacctttgggggtttattttccttagcagctgacaccatgtgtcttttgcatccctggtggtgcttggtgcttctgcccatctgggctcattgagaatagggatgaagatatgattttagggaatttctgatgggctggcatgccccatgtagtatgagttactatataaagtcatgtgactggcattttaacagaccttccagagcttatatatcccaatatatgttgtttcctttgagtagccccagcaggatactgcttagtttttccagtgccattggtgaaagcatttctggaactgtcttcaaagactagaaacactgactcccaaaatgctagaactggaagggaccttaatggttatctattccagcctcctcctaaggtcctcctcagcttctagacctagaagccaaagtccagaacagtgacccattgatcaaggcagatagtataactccttttaagtgttctcagatttgccttttctcagggcaaatcttcagtgttttgtggttatttgtggttgagagagagagagaatgtaatgtctgagactagccagcagctatttgaagcctctgggaaagaaggtggcttatcaagtgggtttgtagtaatgagtgctgctgtaaagcagagccattttcttgtgcagctcatagttcccaaacagttcccaaacagaaattccagagatgtcttaaacattgtggtcatcattgagataggtggaatctctttggtgactacgttggtggggaacatcactcacctgaatgtatgcattctgtgttctctgtgtgtgtgcacatatgcagatgtatgttttaaaaacatttaccaaactcatgattttgtagtcacaccacttcagttctgggccctaccaacaatttatgtcctccaagagctgctggagggcatgtttgtgcccaaaacagaagagctggctctggtttacagaagacagggagggtgaccttactataaatgcccttagaggaaacttatcagttactgccatttcacgcatttcctttttgatcttagtaaatattattggaaggctagtcttgttggtaggagcaaagacacttatttttccacttgccatctttctctatatctccagtaatttgaaaaacacttttcagttggaattgatttttgtctttggtaaaaagaaatatttttaatagataaaagatatatattttaaatatttccccaaattaatactttcattttaagaattgcatagcagttgtaacaagtgcagaatgaagaacaaattcttgttaagcaaatagtccaaactctaggtccagcttactgccttccccccttgtacctacagtgatgcctaggatggtattgacagttgttttctaaacttcctgctgagcaacagtccttcaaatataggtagagtggtctaggttaaggagggaggagggttgatctttaatcaggttggctttggaggaaggaaaaaccactaaggtattatctgaattttaagatgcttcccatccttaataactaaaacctgaatgcttttctttctgaaaaatctccctctctccttccatgattctgaagttggttaaaagtcgatatgttgatgtgtattatttgggggaacagaaaaggacaaggaaggaaacagaacgatgggaagggtttgtgagctagaataagaggtgcaggatttcacaaaacaaattcctcacaaatcattgaagcccagttcaccatacaaattacccatgtcttactctgttccttgtatatatgcattctgggtttttttattattaaaggggaagttaggggggagggtgaaggtcagtctgaggggaaatccaggaaatgtggtgcccttagaagggggctgtcagctcttttccatagagagggaaagaaactttgagaaaatgttcttgacccattgattgtatctgctggaagaagtcatctgggcctgttgggttggtatcagatcaggggattatgcatccagcccctggcccctttaatctatttgcctctttttaaaaaaggttaagtcttcttgggtgaggcttgccagggaaactcctaagtggcttcacttattttttaaattttaatttaatttttaaatttttgcttggaagcagcactggtaataaatgttttattttttgttcattttccctaaaggaaaaatgtccttaagagattaaagctcttaattgattactgtctggttacaaactggcaaactgactaaaatgggaagctgccaccgtgcctgactcatgtagctgatgaccgaaggctcatcctttcttttctatttgacagacatttactgagcttcagacttgagccaaccctgagctggactgtggagataaagcagttcctgctcttgaggagctcaatgtctaatggaatgcatttgaatgtatgtgtggctggagagttcatttatggtcttaggaaagccatttctggtcccatttagaaaactgaccagcacccagcaagctgcattctacattttagagaccccattggtatttgtgaatttgattgcaccaccgcttttcctttactaagtaatgttatggaaggagaatgaattttctcctctagtgattacaggacattaacatctcttcagaagctgcttttagcttaagccccaagaagtgaggtgggttgtggatcactgacatggtcaggggaggcccacacctcaattcagtaaccacctaatctctcccccaacctgatctctcatcagagctggcagcaacttgggattcctttcctttttcctgcctaacttttcattgaaatgtctagtaggagagtgagaaaagagaacaaaggctgggtcacagtcatagaatgttacagctggaatgggcatggaaatcatccaagttaaacttcttctctgccccccgcccccacttttttttttttttttttttaaccaaacgaacttgtgatccagtgccctattttatagtgtggttttccagggtctgaataaataatcattaaagtttgacacacgcagacacacgcaccaatgatggggatacccccaaatgatttaggaggttattttattttaatagttttttcttcctgatttttttcagttagttagagttaaatgtacctatagcccctgaatacatgctcaggtagagaaagtctccatagtataagtaagtaatatgaatgtggaatcttggaaagtgatatattttgattggaataattttaattaaatttaatgattttaattaagaattaaaagccagctagccaaattttctttaaaaattggaaactcattatggtcttaaattgtcctcaggcagccttttcctcatcaacccatagagtggtcttttgaactggtatctaaacatacctggttatgaattctcaaaagagaaagcaggtctggggcggggtggtcaggagacagattctagggaaagtgctgaagagattttcttctgaagatgatctaggaaatgcatctttatacatgattgttagctgctgtagctttctgaagaagattgtagaaaagagactaagatatatgcaagggtcaccagtttagagatcagtcaaattggaaaaagtgccaagactggatgtgcagattgttctatgtattatcagtatttttttcctcttaagaaaaaaatttactctctctcctttgtgagtaaatgcctccttaatgccttttaagtaaggtggcaacttttaactgtcatcttgtgagaggcaacctcaaactctaagcagactccctctctccctttctggtgtcttaaatcaagaactagtttgaagccaaggcaaagcaaggtttgttcatcttcctttcctgtcatttaaggtaaaacaggcaatgaactcgctcttcaaataccatagttcaagagtagctgttggccctggttccagattaatatagcagcaggcagattgccccttcttggggccaccaccctccaaagctgtgccaccaatgagagcattgggttcaagtttgcatcaaacatggtattaccaacgctgagcctccagcagagcacttaaaagtcctagtgagagaatagatactatgcaagggaaaaaaatttaaatgccaacgaatagtttttttttttttgaacctgatacactgtttgtttactctcaactctttgtacaaatattattgtcctaagggccttttcccctcctgcctagaaaataggttgtgtattggttttattcaacctgctgtctgctttaggattggagaaggtacctggatccttgtggactgccactgctggctgcctcctctccaactcatcagaagagcattttgacaaagacagaggacttggaccagggcatgccctgttggggatgtttctgtcagcaaggacatggcatggaatcaagtgggctgatgtgttgttatttaaacagtaccaaagtgcattcttcaatgtatgtttgcctgcttgaagcaaggcccaagttgagaatacagtaaaggaaactcatgaaagtggaaaaaaaaaaaaaaaaaa

SEQ ID NO: 568 - protein, 708 aa, Homo sapiens
MAAAGPSTRASSAAAAAALSRRGRRGRCDETAAAKTGAPGPASGPSLLVLSPPLLQPPLPPRPEESGCAGCLEPPGEAAALPCGHSLCRGCAQRAADAAGPGCPRCRARGPGWARRRARDDGQADSEVLGECARRSQPERCRPRRDGGAAAAGPRPEQEPRAAPAEPDFIFRAPIKLSKPGELREEYESLRKLREEKLQEEKPSEDQIHKLLPEDTETGKRKMDEQKKRDEPLVLKTNLERCPARLSDSENEEPSRGQMTQTHRSAFVSKNNSYSLAFLAGKLNSKVERSQSCSDTAQERAKSRVRAVPGNKAKVTTMTPASNPIIGVLLSTQNNRCVSAPDLTIEKRLPFSSLSSLASLHKPERSVSPESNDSISEELNHFKPIVCSPCTPPKRLPDGRVLSPLIIKSTPRNLNRSLQKQTSYEASPRILKKWEQIFQERQIKKTLSKATLTSLAPEMGEELLGSEGIHSSKEKPLVAVNTRLSGGQVLSEYTGPTSADLDHFPSVSQTKAEQDSDNKSSTEIPLETCCSSELKGGGSGTSLEREQFEGLGSTPDAKLDKTCISRAMKITTVNSVLPQNSVLGGVLKTKQQLKTLNHFDLTNGVLVESLSEEPLPSLRRGRKRHCKTKHLEQNGSLKKLRQTSGEVGLAPTDPVLREMEQKLQQEEEDRQLALQLQRMFDNERRTVSRRKGSVDQYLLRSSNMAGAK

SEQ ID NO: 569 - DNA, 6551 bp, Homo sapiens
  CDS (719)..(4930)
tggcacagatctccagaaacccttgtaatttcctgagtgacaggggtgatagaaacatcttttattagaatacttggtcttggttcctgacacaagagcttctaagacctttggaatctccaagtgataagagtgtatgacagtgagctaactggtggctgggatcctttagacaacttcaggatgggggctatcccctgaaagactaaggcatgattagaggtctgggatttgcagccccacgcctcgacctccagagagggtaaaagggctggagattgattaaccaccagttgccagtgatttaaccaatcatgcctaagtgatggcacctccattaaaaaataaaccacaggtttggagagctttcggtttggttaaccccaaccacataccaagaaggcgatgcacctcaaactgcatgaagacaaaaggtcctgtgctcacctgggacccttctggacgttgccctgtgtacctcttcgactgcctgttcatctacgacgaaccccgggtattgaccccagacaacaatgccacttcatattggggacttcgtctgggattccaaggtgcattcattgcaaagttccttaaatattttctcactgcttcctactaaaggacggacagagcatttgttcttcagccacatactttccttccactggccagcattctcctctattagactagaactgtggataaacctcagaaaatggccacccagcagaaagcctctgacgagaggatctcccagtttgatcacaatttgctgccagagctgtctgctcttctgggcctagatgcagttcagttggcaaaggaactagaagaagaggagcagaaggagcgagcaaaaatgcagaaaggctacaactctcaaatgcgcagtgaagcaaaaaggttaaagacttttgtgacttatgagccgtacagctcatggataccacaggagatggcggccgctgggttttacttcactggggtaaaatctgggattcagtgcttctgctgtagcctaatcctctttggtgccggcctcacgagactccccatagaagaccacaagaggtttcatccagattgtgggttccttttgaacaaggatgttggtaacattgccaagtacgacataagggtgaagaatctgaagagcaggctgagaggaggtaaaatgaggtaccaagaagaggaggctagacttgcgtccttcaggaactggccattttatgtccaagggatatccccttgtgtgctctcagaggctggctttgtctttacaggtaaacaggacacggtacagtgtttttcctgtggtggatgtttaggaaattgggaagaaggagatgatccttggaaggaacatgccaaatggttccccaaatgtgaatttcttcggagtaagaaatcctcagaggaaattacccagtatattcaaagctacaagggatttgttgacataacgggagaacattttgtgaattcctgggtccagagagaattacctatggcatcagcttattgcaatgacagcatctttgcttacgaagaactacggctggactcttttaaggactggccccgggaatcagctgtgggagttgcagcactggccaaagcaggtcttttctacacaggtataaaggacatcgtccagtgcttttcctgtggagggtgtttagagaaatggcaggaaggtgatgacccattagacgatcacaccagatgttttcccaattgtccatttctccaaaatatgaagtcctctgcggaagtgactccagaccttcagagccgtggtgaactttgtgaattactggaaaccacaagtgaaagcaatcttgaagattcaatagcagttggtcctatagtgccagaaatggcacagggtgaagcccagtggtttcaagaggcaaagaatctgaatgagcagctgagagcagcttataccagcgccagtttccgccacatgtctttgcttgatatctcttccgatctggccacggaccacttgctgggctgtgatctgtctattgcttcaaaacacatcagcaaacctgtgcaagaacctctggtgctgcctgaggtctttggcaacttgaactctgtcatgtgtgtggagggtgaagctggaagtggaaagacggtcctcctgaagaaaatagcttttctgtgggcatctggatgctgtcccctgttaaacaggttccagctggttttctacctctcccttagttccaccagaccagacgaggggctggccagtatcatctgtgaccagctcctagagaaagaaggatctgttactgaaatgtgcgtgaggaacattatccagcagttaaagaatcaggtcttattccttttagatgactacaaagaaatatgttcaatccctcaagtcataggaaaactgattcaaaaaaaccacttatcccggacctgcctattgattgctgtccgtacaaacagggccagggacatccgccgatacctagagaccattctagagatcaaagcatttcccttttataatactgtctgtatattacggaagctcttttcacataatatgactcgtctgcgaaagtttatggtttactttggaaagaaccaaagtttgcagaagatacagaaaactcctctctttgtggcggcgatctgtgctcattggtttcagtatccttttgacccatcctttgatgatgtggctgttttcaagtcctatatggaacgcctttccttaaggaacaaagcgacagctgaaattctcaaagcaactgtgtcctcctgtggtgagctggccttgaaagggtttttttcatgttgctttgagtttaatgatgatgatctcgcagaagcaggggttgatgaagatgaagatctaaccatgtgcttgatgagcaaatttacagcccagagactaagaccattctaccggtttttaagtcctgccttccaagaatttcttgcggggatgaggctgattgaactcctggattcagataggcaggaacatcaagatttgggactgtatcatttgaaacaaatcaactcacccatgatgactgtaagcgcctacaacaattttttgaactatgtctccagcctcccttcaacaaaagcagggcccaaaattgtgtctcatttgctccatttagtggataacaaagagtcattggagaatatatctgaaaatgatgactacttaaagcaccagccagaaatttcactgcagatgcagttacttaggggattgtggcaaatttgtccacaagcttacttttcaatggtttcagaacatttactggttcttgccctgaaaactgcttatcaaagcaacactgttgctgcgtgttctccatttgttttgcaattccttcaagggagaacactgactttgggtgcgcttaacttacagtactttttcgaccacccagaaagcttgtcattgttgaggagcatccacttcccaatacgaggaaataagacatcacccagagcacatttttcagttctggaaacatgttttgacaaatcacaggtgccaactatagatcaggactatgcttctgcctttgaacctatgaatgaatgggagcgaaatttagctgaaaaagaggataatgtaaagagctatatggatatgcagcgcagggcatcaccagaccttagtactggctattggaaactttctccaaagcagtacaagattccctgtctagaagtcgatgtgaatgatattgatgttgtaggccaggatatgcttgagattctaatgacagttttctcagcttcacagcgcatcgaactccatttaaaccacagcagaggctttatagaaagcatccgcccagctcttgagctgtctaaggcctctgtcaccaagtgctccataagcaagttggaactcagcgcagccgaacaggaactgcttctcaccctgccttccctggaatctcttgaagtctcagggacaatccagtcacaagaccaaatctttcctaatctggataagttcctgtgcctgaaagaactgtctgtggatctggagggcaatataaatgttttttcagtcattcctgaagaatttccaaacttccaccatatggagaaattattgatccaaatttcagctgagtatgatccttccaaactagtaaaattaattcaaaattctccaaaccttcatgttttccatctgaagtgtaacttcttttcggattttgggtctctcatgactatgcttgtttcctgtaagaaactcacagaaattaagttttcggattcattttttcaagccgtcccatttgttgccagtttgccaaattttatttctctgaagatattaaatcttgaaggccagcaatttcctgatgaggaaacatcagaaaaatttgcctacattttaggttctcttagtaacctggaagaattgatccttcctactggggatggaatttatcgagtggccaaactgatcatccagcagtgtcagcagcttcattgtctccgagtcctctcatttttcaagactttgaatgatgacagcgtggtggaaattgccaaagtagcaatcagtggaggtttccagaaacttgagaacctaaagctttcaatcaatcacaagattacagaggaaggatacagaaatttctttcaagcactggacaacatgccaaacttgcaggagttggacatctccaggcatttcacagagtgtatcaaagctcaggccacaacagtcaagtctttgagtcaatgtgtgttacgactaccaaggctcattagactgaacatgttaagttggctcttggatgcagatgatattgcattgcttaatgtcatgaaagaaagacatcctcaatctaagtacttaactattctccagaaatggatactgccgttctctccaatcattcagaaataaaagattcagctaaaaactgctgaatcaataatttgtcttggggcatattgaggatgtaaaaaaagttgttgattaatgctaaaaaccaaattatccaaaattattttattaaatattgcatacaaaagaaaatgtgtaaggcttgctaaaaaacaaaacaaaacaaaacacagtcctgcatactcaccaccaagctcaagaaataaatcatcaccaatacctttgaggtccctgagtaatccaccccagctaaaggcaaacccttcaatcaagtttatacagcaaaccctccattgtccatggtcaacagggaaggggttggggacaggtctgccaatctatctaaaagccacaatatggaagaagtattcaatttatataataaatggctaacttaacggttgaatcactttcatacatggatgaaacgggtttaacacaggatccacatgaatcttctgtgggccaagagatgttccttaatccttgtagaacctgttttctatattgaactagctttggtacagtagagttaacttactttccatttatccactgccaatataaagaggaaacaggggttagggaaaaatgacttcattccagaggcttctcagagttcaacatatgctataatttagaattttcttatgaatccactctacttgggtagaaaatattttatctctagtgattgcatattatttccatatcatagtatttcatagtattatatttgatatgagtgtctatatcaatgtcagtgtccagaatttcgttcctaccagttaagtagttttctgaacggccagaagaccattcgaaattcatgatactactataagttggtaaacaaccatacttttatcctcatttttattctcactaagaaaaaagtcaactcccctccccttgcccaagtatgaaatatagggacagtatgtatggtgtggtctcatttgtttagaaaaccacttatgactgggtgcggtggctcacacctgtaatcccagcactttgggaggctgaggcgggcgaatcatttgaggtgaggaattcgagaccagcctggccagcatggtgaaaccccatctctactaaaaatacaaaaattagccaggtgtggtggcacatgcctgtagtcccagccactagggcggctgagacgcaagacttgcttgaacccgggaggcagaggttgcagtgagccaagatggcgccactgcattccagcctgggcaacagagcaagaccctgtctgtctcaaaacaaaaaacaaaaccacttatattgctagctacattaagaatttctgaatatgttactgagcttgcttgtggtaaccatttataatatcagaaagtatatgtacaccaaaacatgttgaacatccatgttgtacaactgaaatataaataattttgtcaattatacctaaataaaactggaaaaaaatttctggaagtttatatctaaaaatgttaatagtgcgtacctctaggaagtgggcctggaagccattcttacttttcagtctctcccattctgtactgttttttgttttactttcgtgcctgcattatttttctatttaaaacaaaaataaatctagtttagcact

SEQ ID NO: 570 - protein, 1403 aa, Homo sapiens
MATQQKASDERISQFDHNLLPELSALLGLDAVQLAKELEEEEQKERAKMQKGYNSQMRSEAKRLKTFVTYEPYSSWIPQEMAAAGFYFTGVKSGIQCFCCSLILFGAGLTRLPIEDHKRFHPDCGFLLNKDVGNIAKYDIRVKNLKSRLRGGKMRYQEEEARLASFRNWPFYVQGISPCVLSEAGFVFTGKQDTVQCFSCGGCLGNWEEGDDPWKEHAKWFPKCEFLRSKKSSEEITQYIQSYKGFVDITGEHFVNSWVQRELPMASAYCNDSIFAYEELRLDSFKDWPRESAVGVAALAKAGLFYTGIKDIVQCFSCGGCLEKWQEGDDPLDDHTRCFPNCPFLQNMKSSAEVTPDLQSRGELCELLETTSESNLEDSIAVGPIVPEMAQGEAQWFQEAKNLNEQLRAAYTSASFRHMSLLDISSDLATDHLLGCDLSIASKHISKPVQEPLVLPEVFGNLNSVMCVEGEAGSGKTVLLKKIAFLWASGCCPLLNRFQLVFYLSLSSTRPDEGLASIICDQLLEKEGSVTEMCVRNIIQQLKNQVLFLLDDYKEICSIPQVIGKLIQKNHLSRTCLLIAVRTNRARDIRRYLETILEIKAFPFYNTVCILRKLFSHNMTRLRKFMVYFGKNQSLQKIQKTPLFVAAICAHWFQYPFDPSFDDVAVFKSYMERLSLRNKATAEILKATVSSCGELALKGFFSCCFEFNDDDLAEAGVDEDEDLTMCLMSKFTAQRLRPFYRFLSPAFQEFLAGMRLIELLDSDRQEHQDLGLYHLKQINSPMMTVSAYNNFLNYVSSLPSTKAGPKIVSHLLHLVDNKESLENISENDDYLKHQPEISLQMQLLRGLWQICPQAYFSMVSEHLLVLALKTAYQSNTVAACSPFVLQFLQGRTLTLGALNLQYFFDHPESLSLLRSIHFPIRGNKTSPRAHFSVLETCFDKSQVPTIDQDYASAFEPMNEWERNLAEKEDNVKSYMDMQRRASPDLSTGYWKLSPKQYKIPCLEVDVNDIDVVGQDMLEILMTVFSASQRIELHLNHSRGFIESIRPALELSKASVTKCSISKLELSAAEQELLLTLPSLESLEVSGTIQSQDQIFPNLDKFLCLKELSVDLEGNINVFSVIPEEFPNFHHMEKLLIQISAEYDPSKLVKLIQNSPNLHVFHLKCNFFSDFGSLMTMLVSCKKLTEIKFSDSFFQAVPFVASLPNFISLKILNLEGQQFPDEETSEKFAYILGSLSNLEELILPTGDGIYRVAKLIIQQCQQLHCLRVLSFFKTLNDDSVVEIAKVAISGGFQKLENLKLSINHKITEEGYRNFFQALDNMPNLQELDISRHFTECIKAQATTVKSLSQCVLRLPRLIRLNMLSWLLDADDIALLNVMKERHPQSKYLTILQKWILPFSPIIQK

SEQ ID NO: 571 - DNA, 2951 bp, Homo sapiens
  CDS (464)..(2179)
ctttgggttatgtcgtcatgaagccggcgctctacagttgtgtaaccttgaacaaatgggttcagtatcttggaatttcagttttgtcatcgtttaaaaaatagatctggaaaaatgtgaacgcacaccgtgcatagtggtgaagactgaacgagctgataaagtttttaccattgttttatgaggattttatttacagagtaattgattttcctcgcaggtggcacctggtaaatggttagcccttgcggagaaacaccctgttagttcccagggagagattggcgccctggagagtgattaccagtgtgcctttccattatggtgtgtcacaggtgccgcaagataagcctgatttttcatgactgctttttcctgcccttctgtgccctcaggacactgcccatctctaagataagagcctggaaagaggactctgttggctgttggaaattgcagagtaatgcctcaggtgacatttaatgatgtggctatagacttcactcatgaagagtggggatggctcagttctgctcagagggacttatacaaggatgtgatggtccagaattatgagaacctggtctctgtagcaggtctttctgtaactaagccatatgtgatcacgttattggaggatggaaaagagccctggatgatggagaaaaaactgtcaaaaggtatgattccagattgggaatcaagatgggaaaacaaggaattatcaacaaagaaggataattatgatgaagattcaccccaaacagtaataatagaaaaagttgtaaaacaaagttatgaattttcaaattctaagaagaatttggaatatatagagaagttggaagggaagcatggaagtcaggtagaccatttcagaccagcaattctcacctctagagaaagccccactgcagacagtgtttacaaatacaatatatttagaagcacctttcattcaaagtctactctttctgaaccacaaaaaatttctgctgaagggaattcacacaaatatgatatattaaagaagaacttaccaaaaaagtcagttataaaaaatgagaaagtcaatggtggaaagaaacttttgaattctaataaaagtggggcagccttcagccagggcaaatctcttacccttccccagacttgtaatagagagaaaatctatacatgcagtgaatgtgggaaagcctttggcaaacagtcaatcctcaatcgccactggagaattcatacaggagagaagccctatgaatgtcgtgaatgtgggaagacttttagccatggctcatcccttacacgacatctgataagccatagtggagagaaaccttacaaatgtattgaatgtgggaaggcctttagccatgtctcatcacttactaaccatcagagcactcacactggagagaaaccatatgaatgtatgaactgtggaaagtcttttagtcgtgtgtcccatcttattgaacatctaagaattcatactcaagaaaaactctatgagtgtcgtatatgtggaaaggccttcattcataggtcatctctcattcaccatcagaaaatccatactggagagaagccttatgaatgtagagaatgtgggaaagctttctgctgtagctcacaccttactcgacatcaaagaattcacactatggagaaacaatatgaatgcaacaaatgtctgaaagtctttagtagcctctcatttcttgttcagcatcagagtattcatactgaagaaaaaccctttgaatgtcagaaatgcaggaaatccttcaaccagcttgaatcactgaatatgcatttgagaaatcacattagattgaaaccctacgaatgcagtatatgtgggaaagcctttagtcataggtcatccctgcttcaacatcacagaattcatactggagagaaaccttatgaatgtattaaatgtgggaagaccttcagctgtagttcaaaccttaccgtacatcagagaattcacactggagaaaagccatataaatgtaatgagtgtgggaaagcttttagcaaaggctcaaatcttactgcccatcaaagagtacataatggagagaaacccaatagtgtggtaagtgtggaaaagcctttagactatatgaatcactatacatgtgagaaatcttacagaagagaaactgtatgaagcagtggttatcatggtaaatttcctagattctcccttatttaacattagaaaaatttatactggggaaagtcttatgaatgtggtgaatataggaagaccttttagcaaagatgcaggccagtttgtttattagactttatactgtagagaaatcatatgaagaccataaatgtgggaaagcctttgtcagtattaatcccttaattgacataagtatactcacactaggataaaaccctgtacatgtagcaaatgtgggaaagactacagacaataggaatcttttacaaactcctacaggagagaagctgtatgaatgtagaaaatttagaaattgagggaagtcttcagttccaagtatatcccttattctacagcagagaactcaaaatggagagaaatctcatttaagagatgtagcaaagtgttcactaagagtgtttatcttggtacacatcagaagattaatggtagaacaacctgaaggatttaggagttatgtgtaaatctttgcagtcatgctatttgtaaactggattctacaggagagcaaataaacattataataaaatatgcatttcttagagcagtagcttgcagtttcagttgagttctacttagaaattctttttagctagtgggcatgtgaagatatttagtcacccagaggagccagtaagtgttataatattgaaaattaaagctgcaaaagaaataaagtgatgttaataaaagttttggcatctaataaaatcattttgtatatcac

SEQ ID NO: 572 - protein, 571 aa, Homo sapiens
MPQVTFNDVAIDFTHEEWGWLSSAQRDLYKDVMVQNYENLVSVAGLSVTKPYVITLLEDGKEPWMMEKKLSKGMIPDWESRWENKELSTKKDNYDEDSPQTVIIEKVVKQSYEFSNSKKNLEYIEKLEGKHGSQVDHFRPAILTSRESPTADSVYKYNIFRSTFHSKSTLSEPQKISAEGNSHKYDILKKNLPKKSVIKNEKVNGGKKLLNSNKSGAAFSQGKSLTLPQTCNREKIYTCSECGKAFGKQSILNRHWRIHTGEKPYECRECGKTFSHGSSLTRHLISHSGEKPYKCIECGKAFSHVSSLTNHQSTHTGEKPYECMNCGKSFSRVSHLIEHLRIHTQEKLYECRICGKAFIHRSSLIHHQKIHTGEKPYECRECGKAFCCSSHLTRHQRIHTMEKQYECNKCLKVFSSLSFLVQHQSIHTEEKPFECQKCRKSFNQLESLNMHLRNHIRLKPYECSICGKAFSHRSSLLQHHRIHTGEKPYECIKCGKTFSCSSNLTVHQRIHTGEKPYKCNECGKAFSKGSNLTAHQRVHNGEKPNSVVSVEKPLDYMNHYTCEKSYRRETV

SEQ ID NO: 573 - DNA, 2400 bp, Homo sapiens
  CDS (494)..(1144)
gacaggtgagcgacgaacttctgagacaggtgtgggtgcgagggtcgggagggtcatgggattgggaccgaggtgtgaggagggaatctgcaattccttgctacacagagcgctggcaacttctgacaggctgtttctggggtatgggctgcctcgggttgttgctgttacaaggaaagaaaagagttcccctgcccaccgcctcccagccactgggctacctcctggcaggaaatttgcaaactgagtttaacaagttaggatcagcagagggtagaggagggccctggcagatgtggggtctagaagaggacaggagttatcagggcctccggccattgtgctgggcctttgcctgtacaattgtttctcaagcagttgtgtccctgtggctttggtgcgcctgtgtgcactttctccctccacctggagcatgggctaacaccggaggaaaggaaaagacagagtcagacagggagcctggggaggggccatggtgccaatgcacttactggggagactggagaagccgcttctcctcctgtgctgcgcctccttcctactggggctggctttgctgggcataaagacggacatcacccccgttgcttatttctttctcacattgggtggcttcttcttgtttgcctatctcctggtccggtttctggaatgggggcttcggtcccagctccaatcaatgcagactgagagcccagggccctcaggcaatgcacgggacaatgaagcctttgaagtgccagtctatgaagaggccgtggtgggactagaatcccagtgccgcccccaagagttggaccaaccacccccctacagcactgttgtgatacccccagcacctgaggaggaacaacctagccatccagaggggtccaggagagccaaactggaacagaggcgaatggcctcagaggggtccatggcccaggaaggaagccctggaagagctccaatcaaccttcggcttcggggaccacgggctgtgtccactgctcctgatctgcagagcttggcggcagtccccacattagagcctctgactccaccccctgcctatgatgtctgctttggtcaccctgatgatgatagtgttttttatgaggacaactgggcacccccttaaatgactctcccaagatttctcttctctccacaccagacctcgttcatttgactaacattttccagcgcctactatgtgtcagaaacaagtgtttctgcctggacatcataaatggggacttggaccctgaggagagtcaggccacggtaagcccttcccagctgagatatgggtggcataatttgagtcttctggcaacatttggtgacctaccccatatccaatatttccagcgttagattgaggatgaggtagggaggtgatccagagaaggcggagaaggaagaagtaacctctgagtggcggctattgcttctgttccaggtgctgttcgagctgttagaacccttaggcttgacagctttgtgagttattattgaaaaatgaggattccaagagtcagaggagtttgataatgtgcacgagggcacactgctagtaaataacattaaaataactggaatgaactcctgatcccaaagcctattgtgttttcaacacaaggtaataggaagccaagcaacttgcatgtctcccaatccctgtctagggacagctgctggtgcaggatggaagacttcctataaacagaatgggcgaccaattgtgtctacagagggggtgggctgagcatgggcacgcatgtccccagcctcctggacgagcaaagtcagtcaaagcgctggtgatccctgctccgcgtgcgtagcagtgtctgtgcctctcctgcccaggggctagagagcagtctccagtgcagggtccccatcctatctgaaaacagtggagtcagtgaccccaggtggagggacttccagttttaacaatgggttggtatgaaggccagaaggagtgaaacatgtgaactttctggcgaggagactccctcttgaatcatccatatgtagccccggggtcacttgcgaagagtctctaacagcttctgcctcactcctaagctctgaccgctaggctttcaccccagccgccggtcctgattcctgagatcccaatattgagcaccaggtttcctggaattgtgtgctgcggctgtgatgtaggtttcggtcgctggaagctgctaaaccatagctgacgccccctcctaagccagccttccttccccgcgcgggcatctgtccagggccttgtcgcgctctcagtctccttcgcagcctggccccaaccgttcaacttcaataaagcaaaactccagccaaaaaaaaaaaaaaaaaaaaaaaaaaaaaaaaaaaaaa

SEQ ID NO: 574 - protein, 216 aa, Homo sapiens
MVPMHLLGRLEKPLLLLCCASFLLGLALLGIKTDITPVAYFFLTLGGFFLFAYLLVRFLEWGLRSQLQSMQTESPGPSGNARDNEAFEVPVYEEAVVGLESQCRPQELDQPPPYSTVVIPPAPEEEQPSHPEGSRRAKLEQRRMASEGSMAQEGSPGRAPINLRLRGPRAVSTAPDLQSLAAVPTLEPLTPPPAYDVCFGHPDDDSVFYEDNWAPP

SEQ ID NO: 575 - DNA, 1740 bp, Homo sapiens
  CDS (49)..(1596)
gccctcgcgctgtcgccgccacagtctgcgacgggacccggcgtgcccatgtgtcaggtgggcgaggactacggggagccggcgcctgaggagccgcccccggcgccgcggcccagccgtgagcagaagtgtgtgaagtgcaaggaagcgcagcccgttgtggtgatacgagccggagatgccttctgcagggactgtttcaaggccttctacgtccacaagttcagagccatgctgggcaagaaccggctcatctttccaggcgagaaggtgctcttggcgtggtctggggggccttcgtccagctccatggtctggcaggttcttgagggcctgagccaagattctgccaaaagactgcgctttgtggcaggagtcatctttgttgacgagggagcagcctgtggccagagcctagaggagagatcaaagaccctggccgaagtgaagcccattctgcaagcaactgggttcccatggcatgtggtggccttagaggaggtgttcagcctgccaccgtcggtgctttggtgctctgcccaggagctggtgggatccgagggggcctacaaggcggccgtggacagcttcctccagcagcagcatgtgctgggggccgggggtggtcctggcccgactcaaggggaggaacagccaccccagcccccgctggacccccagaacctggcaagaccgcctgcccctgcccagactgaggctctttcccaactgttctgctcagtgaggacactgactgccaaggaggagcttctgcagaccctgcggacccacctgatcctccacatggcccgagcccacggctactccaaggtcatgactggggacagctgcacacgcttggctatcaagctcatgaccaacctggcgctgggtcgaggggccttcctggcctgggatacgggcttctcggatgagcggcacggggacgtggtggtggtgcggcccatgcgggaccacaccctgaaggaggtcgctttctacaaccgcctgttctccgttccttctgtcttcacaccagccgtcgacaccaaggcccctgaaaaggccagcatccaccggctgatggaggccttcatcctcaggctgcagacccagttcccctccactgtcagcactgtgtacaggacaagtgagaagctggtgaagggcccccgggatggccctgctgctggcgactccggcccccgctgcctcctctgcatgtgtgccctggacgtcgacgccgctgacagtgccacggcttttggggctcagacctcctcgcgtctctcccagatgcagtcacccatccccctgactgagacccggacacccccggggccctgctgttctccaggggtgggctgggcccagcgctgtggccagggggcctgcaggagggaggacccccaagcctgcattgaggagcagctgtgctacagctgccgcgtgaacatgaaggacttgccctcactggaccccctgccgccgtacatcctggctgaggcccagctccgcacacagagggcctggggcttgcaggagatccgggactgtctgattgaggacagtgacgacgaggcgggccagagctgagcgtgaggacgtgcttgccgggacagcaggcagtggccacctggtacaccacactggagccggaaggcaaggacgggggactggcctctgattgtccatttgtataaataaaacattttttaattaaaaaaaaaaaaaaaaaaa

SEQ ID NO: 576 - protein, 515 aa, Homo sapiens
MCQVGEDYGEPAPEEPPPAPRPSREQKCVKCKEAQPVVVIRAGDAFCRDCFKAFYVHKFRAMLGKNRLIFPGEKVLLAWSGGPSSSSMVWQVLEGLSQDSAKRLRFVAGVIFVDEGAACGQSLEERSKTLAEVKPILQATGFPWHVVALEEVFSLPPSVLWCSAQELVGSEGAYKAAVDSFLQQQHVLGAGGGPGPTQGEEQPPQPPLDPQNLARPPAPAQTEALSQLFCSVRTLTAKEELLQTLRTHLILHMARAHGYSKVMTGDSCTRLAIKLMTNLALGRGAFLAWDTGFSDERHGDVVVVRPMRDHTLKEVAFYNRLFSVPSVFTPAVDTKAPEKASIHRLMEAFILRLQTQFPSTVSTVYRTSEKLVKGPRDGPAAGDSGPRCLLCMCALDVDAADSATAFGAQTSSRLSQMQSPIPLTETRTPPGPCCSPGVGWAQRCGQGACRREDPQACIEEQLCYSCRVNMKDLPSLDPLPPYILAEAQLRTQRAWGLQEIRDCLIEDSDDEAGQS

SEQ ID NO: 577 - DNA, 2939 bp, Homo sapiens
  CDS (323)..(1609)
ctcgggcccacgtgagctgtagggaaacgcaggggcggcttctaggtgctgccgccgccaccgccaccaccacctccaccgccgcctcggaacccaggcctggggggcggtggggccgcgtatggagcccccgccccccggagctgccaacattgccaacgccaccgccacgctacacacagcctcaactttcaggagacccgtccgtggccttatttattccacccttcctgtacatcgtagcgaatcaatccgtggcgccgcactcctccgcatccctctttaacagtacccctgggatggcgtgagcactcccccagcgatggacccatctgtgacgctgtggcagtttctgctgcagctgctgagagagcaaggcaatggccacatcatctcctggacttcacgggatggtggtgaattcaagctggtggatgcagaggaggtggcccggctgtgggggctacgcaagaacaagaccaacatgaattacgacaagctcagccgggccttgcggtactactatgacaagaacatcatccgcaaggtgagcggccagaagttcgtctacaagtttgtgtcctaccctgaggtcgcagggtgctccactgaggactgcccgccccagccagaggtgtctgttacctccaccatgccaaatgtggcccctgctgctatacatgccgccccaggggacactgtctctggaaagccaggcacacccaagggtgcaggaatggcaggcccaggcggtttggcacgcagcagccggaacgagtacatgcgctcgggcctctattccaccttcaccatccagtctctgcagccgcagccaccccctcatcctcggcctgctgtggtgctccccagtgcagctcctgcaggggcagcagcgcccccctcggggagcaggagcaccagtccaagccccttggaggcctgtctggaggctgaagaggccggcttgcctctgcaggtcatcctgaccccgcccgaggccccaaacctgaaatcggaagagcttaatgtggagccgggtttgggccgggctttgcccccagaagtgaaagtagaagggcccaaggaagagttggaagttgcgggggagagagggtttgtgccagaaaccaccaaggccgagccagaagtccctccacaggagggcgtgccagcccggctgcccgcggttgttatggacaccgcagggcaggcgggcggccatgcggcttccagccctgagatctcccagccgcagaagggccggaagccccgggacctagagcttccactcagcccgagcctgctaggtgggccgggacccgaacggaccccaggatcgggaagtggctccggcctccaggctccggggccggcgctgaccccatccctgcttcctacgcatacattgaccccggtgctgctgacacccagctcgctgcctcctagcattcacttctggagcaccctgagtcccattgcgccccgtagcccggccaagctctccttccagtttccatccagtggcagcgcccaggtgcacatcccttctatcagcgtggatggcctctcgacccccgtggtgctctccccagggccccagaagccatgactactaccaccaccaccaccaccccttctggggtcactccatccatgctctctccagccagccatctcaaggagaaacatagttcaactgaaagactcatgctctgattgtggtggggtggggatccttgggaagaattactcccaagagtaactctcattatctcctccacagaaaacacacagcttccacaacttctctgttttctgtcagtcccccagtggccgcccttacacgtctcctacttcaatggtaggggcggtttatttatttattttttgaaggccactgggaggagcctgacctaaccttttagggtggttaggacatctcccccacctccccacttttttccccaagacaagacaatcgaggtctggcttgagaacgacctttctttctttatttctcagcctgcccttggggagatgagggagccctgtctgcgtttttggatgtgagtagaagagttagtttgttttgttttattattcctggccatactcaggggtccaggaagaatttgtaccatttaatgggttgggagtcttggccaaggaagaatcacacccttggaatagaaatttccacctccccaacctttctctcagacagcttatccttttcaaccaactttttggccagggaggaatgtcccttttgttcttccccctgagaagccattcctttgtctgccaacctccctggggtcctgcctgtttcctcccaatggagggtttttttggggggtggtccccgtctggggggcccctccagccagtactccaggtctccctgtctctcccccgctgccattttgatagtataatctatttttaaatggggcttttcaataggggagagggagtcatctcttcctatatttggtggggtgggtgggaaggaagggatttgggggggaatcttcctgccgcctcccccactccaagtgtttatttttgataccaaacatgaattttcagttccctccctcccagccccccaatttcctgcgggcgggtacaaaggaccctttcaatgtccctggagttgggagggaggaatgggggacataaagcctgtcctgtctctattctaggcaagagagagtgggttcaaaagactcctgggctcacctgttagcgctggcccagcccaggccttgggacctgggggttggtgatttgggggacagtgctacactcgtctccactgtttgttttacttccccaaaatggaccttttttttttctaaagagtcccagagaatggggaattgttcctgtaaatatatatttttcaaagtgaaaaaaaaaaaaaaaaaaaaaaa

SEQ ID NO: 578 - protein, 428 aa, Homo sapiens
MDPSVTLWQFLLQLLREQGNGHIISWTSRDGGEFKLVDAEEVARLWGLRKNKTNMNYDKLSRALRYYYDKNIIRKVSGQKFVYKFVSYPEVAGCSTEDCPPQPEVSVTSTMPNVAPAAIHAAPGDTVSGKPGTPKGAGMAGPGGLARSSRNEYMRSGLYSTFTIQSLQPQPPPHPRPAVVLPSAAPAGAAAPPSGSRSTSPSPLEACLEAEEAGLPLQVILTPPEAPNLKSEELNVEPGLGRALPPEVKVEGPKEELEVAGERGFVPETTKAEPEVPPQEGVPARLPAVVMDTAGQAGGHAASSPEISQPQKGRKPRDLELPLSPSLLGGPGPERTPGSGSGSGLQAPGPALTPSLLPTHTLTPVLLTPSSLPPSIHFWSTLSPIAPRSPAKLSFQFPSSGSAQVHIPSISVDGLSTPVVLSPGPQKP

SEQ ID NO: 579 - DNA, 3139 bp, Homo sapiens
  CDS (298)..(2271)
acagacagaaacgagggaagagagagaaattggggaccctgaagaaagggggccagcagcaggtaggtgccatcagggacaagaacagcacctcccagggtgggagaccccaggcctttctggcagcaggtctggatggaaagtggacaggaggctcacccgtctgcatcccctgctcctgcccctgctcggctacaaaaaccaaagggacagcagctgaccacaccccggtagccactcctgcataaagctctcccctcctgtgaccagctgaggacctcaggctgcagcggagccatgcccagatacacggtgcacgtacgtggggaatggctggcagtgccctgccaggacgcgcagctcactgtgggctggctgggccgggaggccgtgaggcgctatatcaagaataagcccgacaatggtggcttcacctccgtggatgacgcgcacttccttgtgcgccggtgcaagggcctgggcctgctggacaacgaggaccggctcgaggtggccctagagaacaacgagttcgtggaagtggttatagagggtgatgccatgtctcctgacttcattccatctcaaccagaaggagtttatctatacagcaagtaccgggagcctgaaaagtacatcgagttagatggagaccgtctgaccacggaggatctggtcaacttgggaaagggacgctacaaaataaagctcaccccaacagctgagaagagggtgcagaaatccagggaggtcatagatagcatcataaaagagaaaacagttgtttacggtattactacaggttttgggaaatttgccagaactgtaattcctatcaataagctacaggagcttcaggtcaacttagtacgctcacattcttcaggtgttgggaaaccactaagtcctgagaggtgtcggatgctcttggctttaaggatcaatgtcttagccaaaggatacagtggcatttccctggagaccctcaaacaagtcatagaaatgtttaatgcctcctgcctgccctatgtcccagagaaaggaaccgttggtgccagtggagaccttgccccactctctcatcttgctcttgggctagttggagaagggaagatgtggtctccgaagagtggctgggctgatgctaaatacgtgctagaagcccatggattgaaaccagttattttaaaaccaaaagagggcctggcactcatcaatgggacgcagatgatcacatccctgggctgtgaagctgtagagcgagccagtgctattgcacggcaggctgacattgtggcagccctgacccttgaggtgctgaagggcaccaccaaagcctttgacactgacattcatgctcttcgacctcaccgtgggcaaattgaagttgcttttcggtttcggtcactcttggactcagatcaccacccatcagaaatagcagagagtcacaggttctgtgatcgcgtccaggatgcatacaccttgcgctgctgtccacaggtccatggtgtggtgaatgatacaatagcatttgtgaagaacatcattaccacagaactgaacagcgcaacagataatcctatggtctttgccaataggggagagacagtttctggaggaaacttccatggtgaatacccagccaaagccctagactacttggccattggcatccatgaacttgctgcaatcagtgagagaagaatcgagcggctctgcaatccctccctcagtgagctgcctgccttcctggtggctgaaggtggtctgaactctgggttcatgatagctcactgcacggcagcagcccttgtttctgagaacaaggctctgtgccatccctcgtctgttgactccctctccaccagcgcagccacggaggaccacgtctccatgggaggatgggcagcaaggaaagccctcagggtcatcgagcatgtggagcaagtgctggccatcgagctccttgcagcctgccagggcatagagtttctacgtcccctgaaaacaaccactccgctggagaaggtctatgacctggtgcgctctgttgtaaggccctggataaaagatcgcttcatggccccggacatcgaggcagcccacaggctgctcctggagcagaaggtttgggaagtagctgctccatacattgaaaaatacagaatggagcatattccagaatcaagacctctttctccaacagccttttcactgcaatttctgcacaagaaatccaccaaaatcccggagtctgaggacctttaatgggctttgtcatgaagtagcagatgagagggcagtcagtttagcacaaagcaatactaggctgaaggagagacctgagaactttcctaggtagatcaatccattgtatcattcagttcttctaaagcctacgttggttaggctgatggcagtattatagttgctaaattcagcactgtgttcctgttgtcgtggttcaagacccaccaggtattttcagattataaaacttttctttctttcttaacagtttcaacaggccactcactcttaagggtgagaagaataaccacaattgtatgtgcctgttttttactcttagcattagatgaattcaaatttggaaacagattgatagcaattttttctaaaaacattagacttttgttaacctttttttttttttttaaatttgcttcaacaagctctccaccagttgactttctttggctaattttactttgcatgatatgccttaatatgccttcataaataaccattttaagtcataatttgtccttaagctgcttttttcttctattaattggatcatagtaaagagtagtcaatagggtcttcagctattaattgtagaggtgattaaaaccaacaaggagtttcatgtgcaaaggagataaggaatgaatataaagattgctatttgggtggctcttattaaactgtgtattttgtacttatcactacacgtatcccccaaatgcttacatgggagtttgaggttagtattttcacttccttggtgttagtactctattcacattcttattgtaaccttcctcatttcacagataaggaatctttggggattaaccaacctcctttctgtaatggtaatcattaaaataag

SEQ ID NO: 580 - protein, 657 aa, Homo sapiens
MPRYTVHVRGEWLAVPCQDAQLTVGWLGREAVRRYIKNKPDNGGFTSVDDAHFLVRRCKGLGLLDNEDRLEVALENNEFVEVVIEGDAMSPDFIPSQPEGVYLYSKYREPEKYIELDGDRLTTEDLVNLGKGRYKIKLTPTAEKRVQKSREVIDSIIKEKTVVYGITTGFGKFARTVIPINKLQELQVNLVRSHSSGVGKPLSPERCRMLLALRINVLAKGYSGISLETLKQVIEMFNASCLPYVPEKGTVGASGDLAPLSHLALGLVGEGKMWSPKSGWADAKYVLEAHGLKPVILKPKEGLALINGTQMITSLGCEAVERASAIARQADIVAALTLEVLKGTTKAFDTDIHALRPHRGQIEVAFRFRSLLDSDHHPSEIAESHRFCDRVQDAYTLRCCPQVHGVVNDTIAFVKNIITTELNSATDNPMVFANRGETVSGGNFHGEYPAKALDYLAIGIHELAAISERRIERLCNPSLSELPAFLVAEGGLNSGFMIAHCTAAALVSENKALCHPSSVDSLSTSAATEDHVSMGGWAARKALRVIEHVEQVLAIELLAACQGIEFLRPLKTTTPLEKVYDLVRSVVRPWIKDRFMAPDIEAAHRLLLEQKVWEVAAPYIEKYRMEHIPESRPLSPTAFSLQFLHKKSTKIPESEDL

SEQ ID NO: 581 - DNA, 4225 bp, Homo sapiens
  CDS (438)..(2843)
gcagagggtgcggcccagaggaggccgcgggccgggaagggccgggcgggacgggaaacgttagggcagcggcccccggggtgagggggccgagcggacgggcagggccccgaggcgaactctgcccggatgaggaacaaagcagtggggcaggcgcgtgcgcccccagcgcagctggcaggttgggcagcccccttcccgaagcttctggacggaaggccccaggtgttccccgagatgccccaacccgtggcggggtgcacggccaccggccctcgggagaagttgggcggccccgggcgaccccggggacgagtggccgcgtcggtgcagcggttgtgagcaagatgtggtagcacgtgaccctggaacgcaaaccctgatgcctgttccccaccacccgagcgctcctttctctgatatttggccccaagccgatgcatcacaggatgaatgaaatgaacctgagtccagtggggatggagcagctgacttcatcctctgtgagcaatgccttgccagtctcaggaagtcacctgggattggctgcctcacccactcacagtgccatccctgccccaggcctcccagtggcaattccaaacctgggtccctccctgagctctctgccttctgctctgtctttaatgctaccaatgggtattggggatcgaggggtgatgtgtgggttacctgaaagaaactacaccctacctccaccaccttaccctcacctggagagcagttatttcagaaccattctacctggcattttatcttatttagctgacagaccacctccacagtacatccaccctaactctataaatgttgatggtaatacagcattatctatcaccaataacccttcagcactagatccctatcagtccaatggaaatgttggattagaaccaggcattgtttcaatagactctcgctctgtgaacacacatggtgcccaaagtcttcatcccagtgatggccatgaggtggccttggacacagcaatcactatggagaacgtttctagggttaccagcccaatttcgacagatggaatggcagaggagcttacgatggacggtgttgcaggcgagcattcccaaatcccaaatggctccagaagtcatgaacctctgtctgtggattctgtgagcaacaaccttgcagcagacgctgtaggacatggtggtgtgatacccatgcatgggaatggcctggagctccctgtggtcatggagacagaccacattgcaagtcgggtcaatggcatgtctgacagtgccctcagtgactccattcacactgtggccatgagcaccaactctgtaagcgtggcactctctacctcacacaaccttgcctccctagaatctgtttccctccatgaagttggcctcagcctagaacctgtggctgtctcctccatcacccaggaggttgctatggggacaggtcatgtagatgtatcttcagacagtctttcttttgtatcaccttcactgcaaatggaagactccaattcaaacaaggagaacatggcaaccttgtttacaatttggtgtactctgtgtgaccgcgcctatccctcggactgtcccgaacatggaccagtgacttttgttcctgacactccaatagagagcagagcaaggctttctctcccaaagcagcttgttctccgtcagtcaattgtgggagcagaagttggtgtatggactggagaaaccattcctgtgcggacttgctttggacctctaattggccagcagagtcactccatggaagtagcagaatggacagacaaggcagttaaccatatctggaagatataccacaatggtgtcctagaattctgcatcattacaactgatgaaaatgaatgtaattggatgatgtttgtgcgcaaagccaggaaccgggaagagcagaatttggtggcttatcctcatgatggaaaaatctttttctgcacctcacaagatatccctcctgaaaatgaactgcttttttattatagccgagattatgctcaacagattggtgttcctgaacacccagatgtgcatctctgtaactgtggcaaggagtgcaattcttacacagagttcaaagcccatctgaccagccacatccataaccatcttcctacccagggacatagcggcagccatgggccaagtcacagcaaagaaaggaagtggaagtgctcaatgtgcccccaagcttttatctctccttccaaacttcatgtccactttatgggtcacatgggtatgaagccccacaagtgtgatttctgtagcaaggcttttagtgatcccagcaacctgcggacccacctcaagatacatacaggtcagaagaactacaggtgtaccttgtgtgacaagtctttcacccagaaggctcacctggagtcccacatggttatccacactggggagaagaatcttaagtgtgattactgtgacaagttgtttatgcggaggcaggacctcaagcagcacgtgctcatccacactcaagaacgccagatcaagtgtcccaagtgtgataagctgttcttgagaacaaatcacttaaagaagcatctcaattctcatgaaggaaaacgggattatgtctgtgaaaaatgtacaaaggcttatctaaccaaataccatctcacccgccacctgaaaacctgcaaagggcccacctccagttcgtcagcaccagaggaggaagaagaggatgactcagaagaggaagatctagcagactctgtggggacagaagactgtaggattaacagtgctgtgtattcagcggatgagtctctttctgcacataaataaaaggaaaagaaacaagcaattttggatgaaaatgcaaatggaaaaatacacataaccagttatctactataatggtttttatataaaatggttcctgatttattttcagccagtaatcaaaacagactgggaatgaataaagcacttacagaagagtatcctaatgaaaacactttaaaacagattgggaaaactgagcatgtgtcctgttttaagtggtggactgggagggaagtgtcaacttctgaggtctttatttacatgataatctgggagatgcatttatgcctgaatcaaagctgccttctgctcaaacaaatcagatttatttcacattcttccattattccattttcctgctggtcctgtgacttggtaacattctaaacggtccttgccccatagccatcctgattgctgatagtgttttatgcagactcttgtgacttatactcaccacagaatggattgggacacagcagcataagtgtgctacttggcagctagtaagtttaaagcaggacctgccttaactgctcctggccacttggaagtttagggtagatcttgttttccaaagtttcggcaggtgcctggagggcaaataaaaaagcagcagtcagtcagtagtcagtgatggagagaacaagaggagagatgcctggcctctgcccaagaaattagctttgatggaagcctgagcaagtcacctggttattgtaacgtggagatctttgtaggtttagacatggctccctgtctccagtaaacatccagccattcagacaaagggggcctggagatacagagagcccaaataatgcctgctggattgtctcctgatgagtacatgtggactcacctgaggaagggaaggaagggaataatcttttatgtttcatttaccttatgaaaagtgttaaaacattgccaactcaaaataacattatttaatgcatgtgcaaagttaggtcttcccagttgtctcagtgctgaggaacctcatcagagaagcatggaagatgccaaaggatttttggaaggtaaagaaggctgaatagtgaccacatgggcctgttttcagggtcccagcttagttaagtcacccatgcacctggtcattgtgtctcccatgcacatccagcgtttctcagaagcagacccacccttaagttgacaggattgatggaacatgctctcctgctcaaggcacaacctctgggctggagtagaggactctggtgggaaggttttgctgctaatgtatttatggaatgaatgtatttcattcaaatctgtattcctctaggaaggattaaaattaaacttttttaaaatacaggaaaaaaaaaaaaaaaaaaaaaaaaaaaaaaaaaaaaaaa

SEQ ID NO: 582 - protein, 801 aa, Homo sapiens
MHHRMNEMNLSPVGMEQLTSSSVSNALPVSGSHLGLAASPTHSAIPAPGLPVAIPNLGPSLSSLPSALSLMLPMGIGDRGVMCGLPERNYTLPPPPYPHLESSYFRTILPGILSYLADRPPPQYIHPNSINVDGNTALSITNNPSALDPYQSNGNVGLEPGIVSIDSRSVNTHGAQSLHPSDGHEVALDTAITMENVSRVTSPISTDGMAEELTMDGVAGEHSQIPNGSRSHEPLSVDSVSNNLAADAVGHGGVIPMHGNGLELPVVMETDHIASRVNGMSDSALSDSIHTVAMSTNSVSVALSTSHNLASLESVSLHEVGLSLEPVAVSSITQEVAMGTGHVDVSSDSLSFVSPSLQMEDSNSNKENMATLFTIWCTLCDRAYPSDCPEHGPVTFVPDTPIESRARLSLPKQLVLRQSIVGAEVGVWTGETIPVRTCFGPLIGQQSHSMEVAEWTDKAVNHIWKIYHNGVLEFCIITTDENECNWMMFVRKARNREEQNLVAYPHDGKIFFCTSQDIPPENELLFYYSRDYAQQIGVPEHPDVHLCNCGKECNSYTEFKAHLTSHIHNHLPTQGHSGSHGPSHSKERKWKCSMCPQAFISPSKLHVHFMGHMGMKPHKCDFCSKAFSDPSNLRTHLKIHTGQKNYRCTLCDKSFTQKAHLESHMVIHTGEKNLKCDYCDKLFMRRQDLKQHVLIHTQERQIKCPKCDKLFLRTNHLKKHLNSHEGKRDYVCEKCTKAYLTKYHLTRHLKTCKGPTSSSSAPEEEEEDDSEEEDLADSVGTEDCRINSAVYSADESLSAHK

SEQ ID NO: 583 - DNA, 1376 bp, Homo sapiens
  CDS (422)..(880)
ggcagtgggactgggtttgagctgggcttatcctccaactgtgagggaggctacagcacactccaccccactctcagggctgggaattgttgtggctcagctatttgggggaatctgttttccagtttctcagaaccagcgcaagcacacacatcccaggctcacacccctggtggctggacttgctcccggatagcctcagtcagggagaggcagagctgcctggagcctgctgggctggtggaagccttggtggattctggcaggccaattatagacgaatggcctggggaacccgtgcagcccttggctgagtggttctaagccccagcacgtctgcctctggcttcacccagcctccttttctaactgcccttctctcctccccatcagtgaggaccagacaccactgattgcaggaatgtgttccctccccatggcaagatactacataattaaatatgcagaccagaaggctctatacacaagagatggccagctgctggtgggagatcctgttgcagacaactgctgtgcagagaagatctgcatacttcctaacagaggcttggcccgcaccaaggtccccattttcctggggatccagggagggagccgctgcctggcatgtgtggagacagaagaggggccttccctacagctggaggatgtgaacattgaggaactgtacaaaggtggtgaagaggccacacgcttcaccttcttccagagcagctcaggctccgccttcaggcttgaggctgctgcctggcctggctggttcctgtgtggcccggcagagccccagcagccagtacagctcaccaaggagagtgagccctcagcccgtaccaagttttactttgaacagagctggtagggagacaggaaactgcgttttagccttgtgcccccaaaccaagctcatcctgctcagggtctatggtaggcagaataatgtcccccgaaatatgtccacatcctaatcccaagatctgtgcatatgttaccatacatgtccaaagaggttttgcaaatgtgattatgttaaggatcttgaaatgaggagacaatcctgggttatccttgtgggctcagtttaatcacaagaaggaggcaggaagggagagtcagagagagaatggaagataccatgcttctaattttgaagatggagtgaggggccttgagccaacaaatgcaggtgtttttagaaggtggaaaagccaagggaacggattctcctctagagtctccggaaggaacacagctcttgacacatggatttcagctcagtgacacccatttcagacttctgacctccacaactataaaataataaacttgtgttattgtaaacctctaaaaaaaaaaaa

SEQ ID NO: 584 - protein, 152 aa, Homo sapiens
MCSLPMARYYIIKYADQKALYTRDGQLLVGDPVADNCCAEKICILPNRGLARTKVPIFLGIQGGSRCLACVETEEGPSLQLEDVNIEELYKGGEEATRFTFFQSSSGSAFRLEAAAWPGWFLCGPAEPQQPVQLTKESEPSARTKFYFEQSW

SEQ ID NO: 585 - DNA, 6683 bp, Homo sapiens
  CDS (259)..(1551)
cttccccaccagcccttatccccaccctcaccccgcaaccccttcacgccccctccccctccccctcctcatcctcccaccatcctctaaagaggcaaagggattttttttttcttttggtcttcttttttcccccttccctgtttatcctgaaaaggatttgaagacaagcttgaaggataaaaagccttggtgcttcccaggagccgagccgaggagcagaagaggaagagccgggggctgccgtagcctttggagatggacgagcagcccaggctgatgcattcccatgctggggtcgggatggccggacaccccggcctgtcccagcacttgcaggatggggccggagggaccgagggggagggcgggaggaagcaggacattggagacattttacagcaaattatgaccatcacagaccagagtttggatgaggcgcaggccagaaaacatgctttaaactgccacagaatgaagcctgccttgtttaatgtgttgtgtgaaatcaaagaaaaaacagttttgagtatccgaggagcccaggaggaggaacccacagacccccagctgatgcggctggacaacatgctgttagcggaaggcgtggcggggcctgagaagggcggagggtcggcggcagcggcggcagcggcggcggcttctggaggggcaggttcagacaactcagtggagcattcagattacagagccaaactctcacagatcagacaaatctaccatacggagctggagaaatacgagcaggcctgcaacgagttcaccacccacgtgatgaatctcctgcgagagcaaagccggaccaggcccatctccccaaaggagattgagcggatggtcagcatcatccaccgcaagttcagctccatccagatgcagctcaagcagagcacgtgcgaggcggtgatgatcctgcgttcccgatttctggatgcgcggcggaagagacggaatttcaacaagcaagcgacagaaatcctgaatgaatatttctattcccatctcagcaacccttaccccagtgaggaagccaaagaggagttagccaagaagtgtggcatcacagtctcccaggtatcaaactggtttggaaataagcgaatccggtacaagaagaacataggtaaatttcaagaggaagccaatatttatgctgccaaaacagctgtcactgctaccaatgtgtcagcccatggaagccaagctaactcgccctcaactcccaactcggctggttcttccagttcttttaacatgtcaaactctggagatttgttcatgagcgtgcagtcactcaatggggattcttaccaaggggcccaggttggagccaacgtgcaatcacaggtggatacccttcgccatgttatcagccagacaggaggatacagtgatggactcgcagccagtcagatgtacagtccgcagggcatcagtgctaatggaggttggcaggatgctactaccccttcatcagtgacctcccctacagaaggccctggcagtgttcactctgatacctccaactgatctcccagcaatcgcatcccggctgaccctgtgccccagttggggcaggggcaggagggagggtttctctcccaacgctgaagcggtcagactggaggtcgaagcaatcagcaaacacaataagagtctccttctcttctcttctttgggatgctatttcagccaatctggacacttctttatactctcttcccttttttttctgggtagaagccacccttccctgcctccagctgtcagcctggttttcgtcatcttccctgcccctgtgcctctgtcctagactcccggggtccccgccctctctcatatcactgaaggatattttcaacaattagaggaatttaaagaggaaaaaaattacaaagaaaataataaaagtgtttgtacgttttcatgctggtggtttgaggagccaaatttacctcactcgaatccctcactccctatgttaacaggcaatccttctctgtttctcttattactctcactacctcttagcaggaatactccacattgccctattcattccaggcctccctgcttcctcttgctcttcctccctggggacagtactgattggaacactttcctcctcttccttcctagccccagctattcactggggactgtcatagctgggattctaaaggtgccacatttttcagtttcatctccactaggttggttcccgggcaggaagtcaggcagcagggaaggacacgggaacagcaggtggagaattcctacagtctttcttaccctgctagcaatagctctcagtttcagaggcacagtctttggagaccattcagcactgagaaagcaatatttagaacctattgcaaaactgggcctgagttaggcatggtgatgaatgcatcagcaaggaatagaaagttcttatcgtgaaacccttcaacctcaactatgccttcatagacacacacgttcatgcacatgtaggcacatgtaccatctcacatcttcactttcccgagatgccatatacaattacctacattaataactgtagcactatgccttttgagcccgagagagggaattagtgactctaagtgaaggtcactgacacagagaagcagtatgtgtctggggcttccaggacctgcaggcccactagcgtgcacttaccagaatggcatacacaggacctgatcatgaggaagaccaggtttccagtgtaaactactcttgttcccaccacctctggagcactcagggagccccatacagtacttacaatgtctttaatggacttgattctgtttaattttttgttttatattaggcacactgtattaattttccaaaatgttataccacactatgttcttggtcctgacctattgctctggaggaaagagttgtataagaacgtggctcatgtgaacttttgctagcttcatttgaggacctgagaatcatggggaaagggaaggtaatgttttcattgaaatcatcacagtgatttttattccctgggaacacagcgtgtactaaaaatacatgagaaaatagcatgtatatgaaagctattctcaaaagtcacctgagctcaccatcttcatagccaaccctaccagttataaagatggcagctctatcacttgattaagtgggaggtggtcaaatattttggtgcctcattttcttcatctgtgagatgggaactgttatgcctggcttactaagagtcttgtgagagactgagaagttgattttgttcatatccaatctgtaaatgcgaagtcaggggaagtaatgtccctgaaataaacgggttcatgccatctagggacaataaatggttttcttgttgtaacttctggttaatatcagtaccttgatgtcatcaccgtgatgacaaagagaagagttattgttgatcttcttggttttggtctgtctcttttcttaggataaagaaaaacttccaaactagaaaaacaggccctggttcccttagtttgcacttgaacccaatatgttgccttgtacatacttggtccctgtcacattgactgcttgggaggcttccagggagaagtatgagaccctgaggggtgagaatgggcagctagcaagaacatggaaattctgcttggcactacagtcataaatagaaaacactgtgtgtgctcaggggagcaggggatgccactgaagaaactcaagggaatgtgtatttgaaggaaatgcaaaaactaagtatttagcaaaatgaaattatgccttgatgactaaaaggcactagaaaggttgtgtctactaacttcagccctaatcagaacagatgcctagaaggagcatttttgtgacaacttcatagtgattagaatcagtggagaactccatcttagtggcaggaatataatgaaactacccacgcaagaacatggttgaatcacatttgcttgacttagggcaaagtacgaaagagagacaaaagggttctcttggaaacaagaagagtgactccagatgtggcctgaataattgccatgttaagttaatgcaaaagatcagaacagggctacatttgcacaggcagtttctctccgggccgtagttttcactgatgatcacctttcacagcattttccccaaccagcatttcacttagtcttctctatacccagcacctcccccggcacccccggcaagcccactatcacttccgacttccaacgtggcatccgtgagatctgtccacattaggcgaagcaggagaacactgagagcagcaggatgggtttggaaagagcatgcctctggaaacacagcttcctgggaattcacatgaggccagtcctacagagagcaagatgcaccccaggatttcttcattttctaatagatgtgggagtgctccattttccccgacagcgaatttcccctgagaaacgatactagaccctgggtttgcccaccttgtaactcttccttatctcctccttttcatccctaatccatcctccctctggcatggaattgacgcccgtgcagtacatttgccaagtggcaccttctttcaatttatgttttattttgctatggtggtgattctttatttgctggttgtcttttctcacacatctttctctctgtctctctctttcctgctctttgtttttctgcccagaaaaacctgacttcgataccaaaaaagatgaaactacagaaactcaaatttaaaaaaaactttaaaagaaacaaaaaaatactcaacgattctttcagctttattaacattttccattgtttcttgcgacttgtgtctcgttctttgtagtattgatgatgaacatttgataatgaatgttcttgtatattcagataaagaaaaaaaaaaccaaaaaagcggtctgaatttaatagtgtttataataaaaattttaaaaatgaccctcatagcacgcaaaacaggatggggaatttcccctcttctttctgtgacaatgcgcatcattcctgcattagtttttaacaccagactacctacattcatcatttccctcatttttcttttattttcttgcatttgtgaattagttcaagaatgctagaaaagtgtcgagttgtgcacatccatttcttgtttcacaatgtttaaaagtgacagtaattcattttgtaaactaaaaaaaaaaaaaaaaaggttggaatagtgagcataataggtacaacctaacacattattatgtttattaactttgagacccagaaataaattcttttcttttcttgattcttgctcttaaaaatacaaaaaaaaaaatgttttgttttgtgttatttttggtttgtttattggggggctttttttaattgtcaggattatgatcttgctgtttttcttcaatatgtatacaaggtgatgtgaaaagatgacttgggcagaggagtaagaacaagtaggcttgttcttctactttgcttcagaattcagttaatgccaaaagcgaagatcaagcccatgttgatgtctcgttgctcacctgcatttccagagagtgtgacactcatgcagtccctgagaaaaataaaatcagggacatacttctccttttagccttttaaaaattcaaaaacgtttagtccaagggaactttttatgctatcaggaaaggtttttgctgtttttgattctgattatcacagccaagtactttgttttatttctccctaattaataactacattccatgaggcctcttccaaccaaagaggccttttcttccaggagagtcccgcaggagatgctggtatgatgggcaccattggttaagtaaactacatgcaggaagaagtccttggggccagtctgccagctgagtcctggttttggatgaagagttaatgagatattgggccaggctcaatgctgtagttttaatgctaagaggttacgtttacttcacagagtacacctcttagtaacctctgacttaggcagctgcttaaagcaaattgcaaaactggcttgatttggaatgtttttattagaggaaaaaagaaagccatattatctggaaaaaaattcattttaaataccatcattcaacaaattatgttcagaaagtggtcagaacttaagcaagaaaagtaaagaaagaatgcagaattgtggagcaatgctttaggaaatatttctacctgaacacttgtactcttgaagtcacaacaaaataatgatgagcttttcacatcacctttatggtttcaatccctagctcaaagcttcctggaatcttttattttttgtaaacttttttttcttttgttaaaataaataaaacattcaatgtttttctccttttctctcttattacttctttcctttggcattttcaatttgaaatgctttcctttggttgttggttttattctccccctacccctccccttttcttattattcagaatataaacctgcaaagctctgctctgttttggttttgaaagtttaagcttttctgcttctgtgagagcacaggcttctgtcccttttgattccaactgaacttttgtgttctctaatgatactaacacggtgtaggttttacagtctcctaatttgtactggtaatgcatattccaaataaatag

SEQ ID NO: 586 - protein, 430 aa, Homo sapiens
MDEQPRLMHSHAGVGMAGHPGLSQHLQDGAGGTEGEGGRKQDIGDILQQIMTITDQSLDEAQARKHALNCHRMKPALFNVLCEIKEKTVLSIRGAQEEEPTDPQLMRLDNMLLAEGVAGPEKGGGSAAAAAAAAASGGAGSDNSVEHSDYRAKLSQIRQIYHTELEKYEQACNEFTTHVMNLLREQSRTRPISPKEIERMVSIIHRKFSSIQMQLKQSTCEAVMILRSRFLDARRKRRNFNKQATEILNEYFYSHLSNPYPSEEAKEELAKKCGITVSQVSNWFGNKRIRYKKNIGKFQEEANIYAAKTAVTATNVSAHGSQANSPSTPNSAGSSSSFNMSNSGDLFMSVQSLNGDSYQGAQVGANVQSQVDTLRHVISQTGGYSDGLAASQMYSPQGISANGGWQDATTPSSVTSPTEGPGSVHSDTSN

SEQ ID NO: 587 - DNA, 3070 bp, Homo sapiens
  CDS (284)..(2629)
actcccggaagcagattgcgccagggaaaggccttatcgctgtgtgtgtgtttcagtctacgtggattaaacattacttcgctccgtctgcctggattaaacgtgcactttgcagtcctcacttctccgtaccagtgatctggggatcgctacggaccttaaaatacccatagccccttcgcccctgcaacaggcacttctccccacgtttgatgtgtgaataattacattgactgagaaagaaacccagaagaggaagaagaggaaggaaaaggagtcagtgatggctactcaggggcatttgacattcaaggatgtagccatagaattctctcaggaggagtggaaatgcctggagcctgtgcagaaagctttgtacaaggatgtgatgttggagaactataggaacctggtcttcctaggtatctctcctaaatgtgtgatcaaggaattaccaccaacagagaacagtaatacaggagaaaggttccaaacagtggcactggaaagacatcaaagctatgatattgaaaatttatacttcagggaaatacagaaacatctacatgaccttgaatttcaatggaaagatggtgaaacaaatgataaagaagtgccagtgccccatgaaaacaatcttactggtaaaagagatcaacatagtcaaggggatgtagaaaacaatcatattgaaaaccagcttacatcaaactttgagtcacgtctggctgaactgcagaaagttcaaactgaagggagactttatgaatgtaatgaaacggagaagacaggtaataatggttgtttagtttctccacacattagggaaaaaacgtatgtatgtaatgaatgtggcaaagcctttaaagcgtcttccagccttattaatcatcagaggatacatactacagagaaaccttacaaatgcaatgagtgtggcaaagcctttcatcgggcctcactactaactgtacacaaggtagtccatacaagagggaaatcatatcaatgtgatgtatgtggcaagatcttcagaaaaaattcatattttgtaagacaccaaaggagtcacactggacagaaaccctacatatgtaatgaatgtggcaagtcctttagtaaaagttcccaccttgcagttcatcagagaattcataccggtgaaaaaccttacaaatgtaatctgtgtgggaaatcctttagtcagcgtgtccatcttagacttcatcagacagttcatactggagagagacccttcaaatgtaatgagtgtggcaaaacctttaaacggagctcaaacctcactgtacatcaggtaatccatgcaggaaagaaaccatataaatgtgatgtatgtggcaaggcattcagacatagatcaaatcttgtatgtcaccggagaatccacagtggagagaaacaatacaaatgcaatgaatgtggcaaggtcttcagtaaacgttcaagtcttgcagtgcatcgacgaattcacactgtagagaaaccttgcaaatgcaatgaatgtggcaaggtcttcagtaaacgttcaagtcttgcagtgcatcagagaattcatactggacagaaaacttacaaatgcaataaatgtggcaaggtgtacagtaagcattcacatcttgcagtgcattggagaattcataccggcgagaaagcttataaatgcaatgaatgtggcaaagttttcagcatacattcacgacttgcagctcatcagagaattcatactggagagaaaccttacaaatgcaatgaatgtggcaaggtcttcagtcaacattcacgtcttgcagtgcatcggagaattcatactggagagaaaccttacaaatgcaaagaatgtggcaaggtcttcagtgaccgttcagcttttgcaaggcatcggagaattcatactggagagaagccttacaaatgcaaagaatgtggcaaggtcttcagtcaatgttcacgtcttacagtgcatcggagaattcatagtggagagaaaccttacaaatgcaatgaatgcggcaaggtctacagtcagtattcacatcttgtagggcatcgaagagttcatactggagagaaaccatacaaatgtcatgaatgtggcaaagcctttaatcagggctccacactcaatagacatcagagaattcataccggagagaaaccttacaaatgcaatcagtgtgggaattcctttagtcagcgtgtccatcttagacttcatcagactgttcatactggagacagaccttacaaatgtaatgagtgtggcaaaacctttaaacggagctcaaacctcactgcacatcagataattcatgcaggaaagaaaccatataaatgtgatgaatgtggcaaggtattcaggcatagttcacatcttgtaagtcaccagagaatccacactggagagaaaagatacaaatgtattgaatgtggcaaagcctttgggcggttgttttccctcagcaaacaccaaagaattcattctggcaaaaaaccttataaatgtaatgagtgtgggaaatcttttatttgtcgctcaggcctcactaaacatcgaataagacatactggagagagccttacaactaaactcaatgtgacaaggccttagacgttgtcctagtttctggaatcaccgaataattcctacttactgatataccttgtatatttaccccttctcttgaaatccctgtggaattgtaatctccagtattggaggtggggcccattgggaggtgattgaatcatggaagtggatttctcaaactgagaaagatgtagcgtcatccccttggtgctgtcctggcaatagtgacttctcttgaggtctggctgtttagaagtgcatagcacttccctgtcgcttgccctcattctcaccatgtgaaataccgacacccgctttgccttccaccatgattttaaccttcctgaggcttccctagagggtgatcagatgccagcaccatgttttcatttaagccttcagaaatatgagccaattaaactcttttctttatacattaaaaaaaaaaaaaaaaaaaaaaaa

SEQ ID NO: 588 - protein, 781 aa, Homo sapiens
MATQGHLTFKDVAIEFSQEEWKCLEPVQKALYKDVMLENYRNLVFLGISPKCVIKELPPTENSNTGERFQTVALERHQSYDIENLYFREIQKHLHDLEFQWKDGETNDKEVPVPHENNLTGKRDQHSQGDVENNHIENQLTSNFESRLAELQKVQTEGRLYECNETEKTGNNGCLVSPHIREKTYVCNECGKAFKASSSLINHQRIHTTEKPYKCNECGKAFHRASLLTVHKVVHTRGKSYQCDVCGKIFRKNSYFVRHQRSHTGQKPYICNECGKSFSKSSHLAVHQRIHTGEKPYKCNLCGKSFSQRVHLRLHQTVHTGERPFKCNECGKTFKRSSNLTVHQVIHAGKKPYKCDVCGKAFRHRSNLVCHRRIHSGEKQYKCNECGKVFSKRSSLAVHRRIHTVEKPCKCNECGKVFSKRSSLAVHQRIHTGQKTYKCNKCGKVYSKHSHLAVHWRIHTGEKAYKCNECGKVFSIHSRLAAHQRIHTGEKPYKCNECGKVFSQHSRLAVHRRIHTGEKPYKCKECGKVFSDRSAFARHRRIHTGEKPYKCKECGKVFSQCSRLTVHRRIHSGEKPYKCNECGKVYSQYSHLVGHRRVHTGEKPYKCHECGKAFNQGSTLNRHQRIHTGEKPYKCNQCGNSFSQRVHLRLHQTVHTGDRPYKCNECGKTFKRSSNLTAHQIIHAGKKPYKCDECGKVFRHSSHLVSHQRIHTGEKRYKCIECGKAFGRLFSLSKHQRIHSGKKPYKCNECGKSFICRSGLTKHRIRHTGESLTTKLNVTRP

SEQ ID NO: 589 - DNA, 2940 bp, Homo sapiens
  CDS (267)..(2063)
atttggttgaaagaaaacccacaatccagtgtcaagaaagaagtcaacttttcttcccctacttccctgcatttctcctctgtgctcactgccacacgcagctcaacctggacggcacagccagaggcgagatgcttctctgctgatctgagtctgcctgcagcatggacctgggtcttccctgaagcatctccagggctggagggacgactgccatgcaccgagggctcatccatccgcagagcagggcagtgggaggagacgccatgacccccatcgtcacagtcctgatctgtctcgggctgagtctgggccccaggacccacgtgcagacagggaccattcccaagcccaccctgtgggctgagccagactctgtgatcacccaggggagtcccgtcaccctcagttgtcaggggagccttgaagcccaggagtaccgtctatatagggagaaaaaatcagcatcttggattacacggatacgaccagagcttgtgaagaacggccagttccacatcccatccatcacctgggaacacacagggcgatatggctgtcagtattacagccgcgctcggtggtctgagctcagtgaccccctggtgctggtgatgacaggagcctacccaaaacccaccctctcagcccagcccagccctgtggtgacctcaggaggaagggtgaccctccagtgtgagtcacaggtggcatttggcggcttcattctgtgtaaggaaggagaagaagaacacccacaatgcctgaactcccagccccatgcccgtgggtcgtcccgcgccatcttctccgtgggccccgtgagcccgaatcgcaggtggtcgcacaggtgctatggttatgacttgaactctccctatgtgtggtcttcacccagtgatctcctggagctcctggtcccaggtgtttctaagaagccatcactctcagtgcagccgggtcctgtcgtggcccctggggaaagcctgaccctccagtgtgtctctgatgtcggctatgacagatttgttctgtacaaggagggggaacgtgaccttcgccagctccctggccggcagccccaggctgggctctcccaggccaacttcaccctgggccctgtgagccgctcctacgggggccagtacagatgctacggtgcacacaacctctcctctgagtgctcggcccccagcgaccccctggacatcctgatcacaggacagatccgtggcacacccttcatctcagtgcagccaggccccacagtggcctcaggagagaacgtgaccctgctgtgtcagtcatggcggcagttccacactttccttctgaccaaggcgggagcagctgatgccccactccgtctaagatcaatacacgaatatcctaagtaccaggctgaattccccatgagtcctgtgacctcagcccacgcggggacctacaggtgctacggctcactcaactccgacccctacctgctgtctcaccccagtgagcccctggagctcgtggtctcaggaccctccatgggttccagccccccacccaccggtcccatctccacacctgcaggccctgaggaccagcccctcacccccactgggtcggatccccaaagtggtctgggaaggcacctgggggttgtgatcggcatcttggtggccgtcgtcctactgctcctcctcctcctcctcctcttcctcatcctccgacatcgacgtcagggcaaacactggacatcgacccagagaaaggctgatttccaacatcctgcaggggctgtggggccagagcccacagacagaggcctgcagtggaggtccagcccagctgccgacgcccaggaagaaaacctctatgctgccgtgaaggacacacagcctgaagatggggtggagatggacactcgggctgctgcatctgaagccccccaggatgtgacctacgcccagctgcacagcttgaccctcagacggaaggcaactgagcctcctccatcccaggaaagggaacctccagctgagcccagcatctacgccaccctggccatccactagcccggagggtacgcagactccacactcagtagaaggagactcaggactgctgaaggcacgggagctgcccccagtggacaccaatgaaccccagtcagcctggacccctaacaaagaccatgaggagatgctgggaactttgggactcacttgattctgcagtcgaaataactaatatccctacattttttaattaaagcaacagacttctcaataatcaatgagttaaccgagaaaactaaaatcagaagtaagaatgtgctttaaactgaatcacaatataaatattacacatcacacaatgaaattgaaaaagtacaaaccacaaatgaaaaaagtagaaacgaaaaaaaaaaactaggaaatgaatgacgttggctttcgtataaggaatttagaaaaagaataaccaattattccaaatgaaggtgtaagaaagggaataagaagaagaagagttgctcatgaggaaaaaccaaaacttgaaaattcaacaaagccaatgaagctcattcttgaaaatattaattacagtcataaatcctaactacattgagcaagagaaagaaagagcaggcacgcatttccatatgggagtgagccagcagacagcccagcagatcctacacacattttcacaaactaaccccagaacaggctgcaaacctataccaatatactagaaaatgcagattaaatggatgaaatattcaaaactggagtttacataatgaacgtaagagtaatcagagaatctgactcattttaaatgtgtgtgtatgtgtgtgtatatatatgtgtgtgtgtgtgtgtgtgtgtgtgtgtgaaaaacattgactgtaataaaaatgttcccatcgtaaaaaaaaaaaaaaaa

SEQ ID NO: 590 - protein, 598 aa, Homo sapiens
MTPIVTVLICLGLSLGPRTHVQTGTIPKPTLWAEPDSVITQGSPVTLSCQGSLEAQEYRLYREKKSASWITRIRPELVKNGQFHIPSITWEHTGRYGCQYYSRARWSELSDPLVLVMTGAYPKPTLSAQPSPVVTSGGRVTLQCESQVAFGGFILCKEGEEEHPQCLNSQPHARGSSRAIFSVGPVSPNRRWSHRCYGYDLNSPYVWSSPSDLLELLVPGVSKKPSLSVQPGPVVAPGESLTLQCVSDVGYDRFVLYKEGERDLRQLPGRQPQAGLSQANFTLGPVSRSYGGQYRCYGAHNLSSECSAPSDPLDILITGQIRGTPFISVQPGPTVASGENVTLLCQSWRQFHTFLLTKAGAADAPLRLRSIHEYPKYQAEFPMSPVTSAHAGTYRCYGSLNSDPYLLSHPSEPLELVVSGPSMGSSPPPTGPISTPAGPEDQPLTPTGSDPQSGLGRHLGVVIGILVAVVLLLLLLLLLFLILRHRRQGKHWTSTQRKADFQHPAGAVGPEPTDRGLQWRSSPAADAQEENLYAAVKDTQPEDGVEMDTRAAASEAPQDVTYAQLHSLTLRRKATEPPPSQEREPPAEPSIYATLAIH

SEQ ID NO: 591 - DNA, 1834 bp, Homo sapiens
  CDS (116)..(1600)
gccgagcccagctccccgcggcggccgctagcccccggccccgagccaccactccgacctagcggccgccgcccccggtgcgggatgaggagatccgcggccgccactgggccccatggaggagccgcagccgccccgcccaccagcgagcatggccttactgggcagccagcactccggcgccccctccgcggccggcccacctggcgggacttcctccgcggccacggcggccgtgctctccttcagcaccgtggcgaccgcggcgctggggaacctgagcgacgcaagcggaggcggcacagctgccgctcccggtggcggcggccttggcgggtccggggcagcgcgggaggcgggggcggcggtgaggcggccgctaggcccggaggcggcgccgctgctgtcgcacggagctgcagtggcggcccaggcgctcgtcctcctgctcatcttcctgctgtctagccttggcaactgcgcggtgatgggggtgattgtgaagcaccggcagctccgcaccgtcaccaacgccttcatcctgtcgctgtccctatcggatctgctcacggcgctgctctgcctgcccgccgccttcctggacctcttcactccgcccgggggttcggcgcctgccgccgccgcggggccctggcgcggcttctgcgccgccagccgcttcttcagctcgtgcttcggcatcgtgtccacgctcagcgtggcgctcatctcgttggaccgttactgcgctatcgtgcggccgccgcgggagaagatcggccgccgccgcgcgctgcagctgctggcgggcgcctggctgacggccctgggcttctccttgccctgggagctgctcggggcgccccgggaactcgcggcggcgcagagcttccacggctgcctctaccggacctccccggaccccgcgcagctgggcgcggccttcagcgtggggctggtggtggcctgctacctgctgcccttcctgctcatgtgcttctgccactaccacatctgcaagacggtgcgcctgtcggacgtgcgcgtgcggccggtgaacacctacgcgcgcgtgctgcgcttcttcagcgaggtgcgcacggccaccaccgtcctcatcatgatcgtcttcgtcatctgctgctgggggccctactgcttcctggtgctgctggccgccgcccggcaggcccagaccatgcaggccccctcgctcctcagcgtggtggccgtctggctgacctgggccaatggggccatcaaccctgtcatctacgccatccgcaatcccaacatttcgatgctcctagggcgcaaccgcgaggagggctaccggactaggaatgtggacgctttcctgcccagccagggcccgggtctgcaagccagaagccgcagtcgccttcgaaaccgctatgccaaccggctgggggcctgcaacaggatgtcctcttccaacccggccagcggagtggcaggggacgtggccatgtgggcccgcaaaaatccagttgtacttttctgccgagagggaccaccagagccggtgacggcagtgaccaaacagcctaaatccgaagctggggataccagcctctaagacggttggaatggccagcttatgaaggcaaatttccactcgcattatttaatgatggaagattctgggggagagttgtggatttcataaagccaaacatttaaagctagagacgggggaggcttaccactttccccaaacaacataaaagacaatgtcccttcttcaaaagtgccaaaaggaatgtaaaatgcaaaaattaaaacaatcttaaaccacaaaaaaaaaaaaaaa

SEQ ID NO: 592 - protein, 494 aa, Homo sapiens
MEEPQPPRPPASMALLGSQHSGAPSAAGPPGGTSSAATAAVLSFSTVATAALGNLSDASGGGTAAAPGGGGLGGSGAAREAGAAVRRPLGPEAAPLLSHGAAVAAQALVLLLIFLLSSLGNCAVMGVIVKHRQLRTVTNAFILSLSLSDLLTALLCLPAAFLDLFTPPGGSAPAAAAGPWRGFCAASRFFSSCFGIVSTLSVALISLDRYCAIVRPPREKIGRRRALQLLAGAWLTALGFSLPWELLGAPRELAAAQSFHGCLYRTSPDPAQLGAAFSVGLVVACYLLPFLLMCFCHYHICKTVRLSDVRVRPVNTYARVLRFFSEVRTATTVLIMIVFVICCWGPYCFLVLLAAARQAQTMQAPSLLSVVAVWLTWANGAINPVIYAIRNPNISMLLGRNREEGYRTRNVDAFLPSQGPGLQARSRSRLRNRYANRLGACNRMSSSNPASGVAGDVAMWARKNPVVLFCREGPPEPVTAVTKQPKSEAGDTSL

SEQ ID NO: 593 - DNA, 7165 bp, Homo sapiens
  CDS (476)..(5722)
cgggcatgctcagtgggccgggccggcaggtttgcgtggccgctgagttgccggcgccggctgagccagcggacgccgcgttccttggcggccgccggttcccgggaagttacgtggcgaagccggcttccgaggagacgccgggaggccacgggtgctgctgacgggcgggcgaccgggcgaggccgacgtggccgggctgcgaaagctgcgggaggccgagtgggtggccgcgctcggagggaggtgccggtcgggcgcgccccgtggagaagacccgggcggggcgggcgcttcccggacttttgtccgagttgaattccctccccctgggccgggcccttccggccgcccccgcccgtgccccgctcgctctcgggagatgtttatttgggctgtggcgtgaggagcgggcgggccagcgccgcggagtttcgggtccgaggagcctcgcgcggcgctggagagagacaagatgtccgccagagctgcggccgccaagagcacagcaatggaggaaacagctatatgggaacaacatacagtgacgcttcacagggctcctggatttggatttggaattgcaatatctggtggacgagataatcctcattttcagagtggggaaacgtcaatagtgatttcagatgtgctgaaaggaggaccagctgaaggacagctacaggaaaatgaccgagttgcaatggttaacggagtttcaatggataatgttgaacatgcttttgctgttcagcaactaaggaaaagtgggaaaaatgcaaaaattacaattagaaggaagaagaaagttcaaataccagtaagtcgtcctgatcctgaaccagtatctgataatgaagaagatagttatgatgaggaaatacatgatccaagaagtggccggagtggtgtggttaacagaaggagtgagaagatttggccgagggatagaagtgcaagtagagagaggagcttgtccccgcggtcagacaggcggtcagtggcttccagccagcctgctaaacctactaaagtcacactggtgaaatcccggaaaaatgaagaatatggtcttcgattggcaagccatatatttgttaaggaaatttcacaagatagtttggcagcaagagatggcaatattcaagaaggtgatgttgtattgaagataaatggtactgtgacagaaaatatgtcattgacagatgcaaagacattgatagaaaggtctaaaggcaaattaaaaatggtagttcaaagagatgaacgggctacgctattgaatgtccctgatctttctgacagcatccactctgctaatgcctctgagagagacgacatttcagaaattcagtcactggcatcagatcattctggtcgatcacacgataggcctccccgccgcagccggtcacgatctcctgaccagcggtcagagccttctgatcattccaggcactcgccgcagcagccaagcaatggcagtctccggagtagagatgaagagagaatttctaaacctggggctgtctcaactcctgtaaagcatgctgatgatcacacacctaaaacagtggaagaagttacagttgaaagaaatgagaaacaaacaccttctcttccagaaccaaagcctgtgtatgcccaagttgggcaaccagatgtggatttacctgtcagtccatctgatggtgtcctacctaattcaactcatgaagatgggattcttcggcccagcatgaaattggtaaaattcagaaaaggagatagtgtgggtttgcggctggctggtggaaatgatgttggaatatttgtagctggcgttctagaagatagccctgcagccaaggaaggcttagaggaaggtgatcaaattctcagggtaaacaacgtagattttacaaatatcataagagaagaagccgtccttttcctgcttgacctccctaaaggagaagaagtgaccatattggctcagaagaagaaggatgtttatcgtcgcattgtagaatcagatgtaggagattctttctatattagaacccattttgaatatgaaaaggaatctccctatggacttagttttaacaaaggagaggtgttccgtgttgtggataccttgtacaatggaaaactgggctcttggcttgctattcgaattggtaaaaatcataaggaggtagaacgaggcatcatccctaataagaacagagctgagcagctagccagtgtacagtatacacttccaaaaacagcaggcggagaccgtgctgacttctggagattcagaggtcttcgcagctccaagagaaatcttcgaaaaagcagagaggatttgtccgctcagcctgttcaaacaaagtttccagcttatgaaagagtggttcttcgagaagctggatttctgaggcctgtaaccatttttggaccaatagctgatgttgccagagaaaagctggcaagagaagaaccagatatttatcaaattgcaaagagtgaaccacgagacgctggaactgaccaacgtagctctggcattattcgcctgcatacaataaagcaaatcatagatcaagacaaacatgctttattagatgtaacaccaaatgcagttgatcgtcttaactatgcccagtggtatccaattgttgtatttcttaaccctgattctaagcaaggagtaaaaacaatgagaatgaggttatgtccagaatctcggaaaagtgccaggaagttatacgagcgatctcataaacttcgtaaaaataatcaccatctttttacaactacaattaacttaaattcaatgaatgatggttggtatggtgcgctgaaagaagcaattcaacaacagcaaaaccagctggtatgggtttccgagggaaaggcggatggtgctacaagtgatgaccttgatttgcatgatgatcgtctgtcctacctgtcagctccaggtagtgaatactcaatgtatagcacggacagtagacacacttctgactatgaagacacagacacagaaggcggggcctacactgatcaagaactagatgaaactcttaatgatgaggttgggactccaccggagtctgccattacacggtcctctgagcctgtaagagaggactcctctggaatgcatcatgaaaaccaaacatatcctccttactcaccacaagcgcagccacaaccaattcatagaatagactcccctggatttaagccagcctctcaacagaaagcagaagcttcatctccagtcccttacctttcgcctgaaacaaacccagcatcatcaacctctgctgttaatcataatgtaaatttaactaatgtcagactggaggagcccaccccagctccttccacctcttactcaccacaagctgattctttaagaacaccaagtactgaggcagctcacataatgctaagagatcaagaaccatcattgtcgtcgcatgtagatccaacaaaggtgtatagaaaggatccatatcccgaggaaatgatgaggcagaaccatgttttgaaacagccagccgttagtcacccagggcacaggccagacaaagagcctaatctgacctatgaaccccaactcccatacgtagagaaacaagccagcagagacctcgagcagcccacatacagatacgagtcctcaagctatacggaccagttttctcgaaactatgaacatcgtctgcgatacgaagatcgcgtccccatgtatgaagaacagtggtcatattatgatgacaaacagccctacccatctcggccaccttttgataatcagcactctcaagaccttgactccagacagcatcccgaagagtcctcagaacgagggtactttccacgttttgaagagccagcccctctgtcttacgacagcagaccacgttacgaacaggcacctagagcatccgccctgcggcacgaagagcagccagctcctgggtatgacacacatggtagactcagaccggaagcccagccccacccttcagcagggcccaagcctgcagagtccaagcagtattttgagcaatattcacgcagttacgagcaagtaccaccccaaggatttacctctagagcaggtcattttgagcctctccatggtgctgcagctgtccctccgctgataccttcatctcagcataagccagaagctctgccttcaaacaccaaaccactgcctccacccccaactcaaaccgaagaagaggaagatccagcaatgaagccacagtctgtactcaccagagttaagatgtttgaaaacaaaagatctgcatccttagagaccaagaaggatgtaaatgacactggcagttttaagcctccagaagtagcatctaaaccttcaggtgctcccatcattggtcccaaacccacttctcagaatcaattcagtgaacatgacaaaactctgtacaggatcccagaacctcaaaaacctcaactgaagccacctgaagatattgttcggtccaatcattatgaccctgaagaagatgaagaatattatcgaaaacagctgtcatactttgaccgaagaagttttgagaataagcctcctgcacacattgccgccagccatctctccgagcctgcaaagccagcgcattctcagaatcaatcaaatttttctagttattcttcaaagggaaagcctcctgaagctgatggtgtggatagatcatttggcgagaaacgctatgaacccatccaggccactccccctcctcctccattgccctcgcagtatgcccagccatctcagcctgtcaccagcgcgtctctccacatacattctaagggagcacatggtgaaggtaattcagtgtcattggattttcagaattccttagtgtccaaaccagacccacctccatctcagaataagccagcaactttcagaccaccaaaccgagaagatactgctcaggcagctttctatccccagaaaagttttccagataaagccccagttaatggaactgaacagactcagaaaacagtcactccagcatacaatcgattcacaccaaaaccatatacaagttctgcccgaccatttgaacgcaagtttgaaagtcctaaattcaatcacaatcttctgccaagtgaaactgcacataaacctgacttgtcttcaaaaactcccacttctccaaaaactcttgtgaaatcgcacagtttggcacagcctcctgagtttgacagtggagttgaaactttctctatccatgcagagaagcctaaatatcaaataaataatatcagcacagtgcctaaagctattcctgtgagtccttcagctgtggaagaggatgaagatgaagatggtcatactgtggtggccacagcccgaggcatatttaacagcaatgggggcgtgctgagttccatagaaactggtgttagtataattatccctcaaggagccattcccgaaggagttgagcaggaaatctatttcaaggtctgccgggacaacagcatccttccacctttagataaagagaaaggtgaaacactgctgagtcctttggtgatgtgtggtccccatggcctcaagttcctgaagcctgtggagctgcgcttaccacactgtgatcctaaaacctggcaaaacaagtgtcttcccggagatccaaattatctcgttggagcaaactgtgtttctgtccttattgaccacttttaactcttgaaatataggaacttaaataatgtgaaactggattaaacttaatctaaatggaaccactctatcaagtattataccttttttagagttgatactacagtttgttagtatgaggcatttgtttgaactgataaagatgagtgagcatgcccctgaaccatggtcggaaaacatgctacacactgcatgtttgtgattgacgggactgttggtattggctagaggttcaaagatattttgctttgtgatttttgtaatttttttatcgtcactgcttaacttcacatattgatttccgttaaaataccagccagtaaatgggggtgcatttgaggtctgttctttccaaagtacactgtttcaaactttactatggccctggcctagcatacgtacacattttattttattatgcatgaagtaatatgcacacattttttaaatgcacctggaatatataaccagtgttgtggatttaacagaaatgtacagcaaggagatttacaactgggggagggtgaagtgaagacaatgacttactgtacatgaaaacacatttttcttagggaaggatacaaaagcatgtgagactggttccatggcctcttcagatctctaacttcaccatattaccacagacatactaaccagcagaaatgccttaccctcatgttcttaattcttagctcattctccttgtgttactaagtttttatggcttttgtgcattatctagatactgtatcatgacaaagactgagtacgttgtgcatttggtggtttcagaaatgtgttatcacccagaagaaaatagtggtgtgatttggggatatttttttcttttcttttcttttctttttttttttttttgacaaggggcagtggtggttttctgttctttctggctatgcatttgaaaattttgatgttttaaggatgcttgtacataatgcgtgcataccacttttgttcttggtttgtaaattaacttttataaactttaccttttttatacataaacaagaccacgtttctaaaggctacctttgtattctctcctgtacctcttgagccttgaactttgacctctgcagcaataaagcagcgtttctatgacacatgcaaggtcattttttttaagaaaaaggatgcacagagttgttacatttttaagtgctgcatttaaaagatacagttactcagaattctctagtttgattaaattcttgcaaagtatccctactgtaatttgtgatacaatgctgtgccctaaagtgtatttttttactaatagacaatttattatggcacatcagcacgatttctgtttagataatacaccactacattctgttaatcattaggtgtgactgaatttcttttgccgttattaaaaatctcaaatttctaaatctccaaaataaaactttttaaaataaa

SEQ ID NO: 594 - protein, 1748 aa, Homo sapiens
MSARAAAAKSTAMEETAIWEQHTVTLHRAPGFGFGIAISGGRDNPHFQSGETSIVISDVLKGGPAEGQLQENDRVAMVNGVSMDNVEHAFAVQQLRKSGKNAKITIRRKKKVQIPVSRPDPEPVSDNEEDSYDEEIHDPRSGRSGVVNRRSEKIWPRDRSASRERSLSPRSDRRSVASSQPAKPTKVTLVKSRKNEEYGLRLASHIFVKEISQDSLAARDGNIQEGDVVLKINGTVTENMSLTDAKTLIERSKGKLKMVVQRDERATLLNVPDLSDSIHSANASERDDISEIQSLASDHSGRSHDRPPRRSRSRSPDQRSEPSDHSRHSPQQPSNGSLRSRDEERISKPGAVSTPVKHADDHTPKTVEEVTVERNEKQTPSLPEPKPVYAQVGQPDVDLPVSPSDGVLPNSTHEDGILRPSMKLVKFRKGDSVGLRLAGGNDVGIFVAGVLEDSPAAKEGLEEGDQILRVNNVDFTNIIREEAVLFLLDLPKGEEVTILAQKKKDVYRRIVESDVGDSFYIRTHFEYEKESPYGLSFNKGEVFRVVDTLYNGKLGSWLAIRIGKNHKEVERGIIPNKNRAEQLASVQYTLPKTAGGDRADFWRFRGLRSSKRNLRKSREDLSAQPVQTKFPAYERVVLREAGFLRPVTIFGPIADVAREKLAREEPDIYQIAKSEPRDAGTDQRSSGIIRLHTIKQIIDQDKHALLDVTPNAVDRLNYAQWYPIVVFLNPDSKQGVKTMRMRLCPESRKSARKLYERSHKLRKNNHHLFTTTINLNSMNDGWYGALKEAIQQQQNQLVWVSEGKADGATSDDLDLHDDRLSYLSAPGSEYSMYSTDSRHTSDYEDTDTEGGAYTDQELDETLNDEVGTPPESAITRSSEPVREDSSGMHHENQTYPPYSPQAQPQPIHRIDSPGFKPASQQKAEASSPVPYLSPETNPASSTSAVNHNVNLTNVRLEEPTPAPSTSYSPQADSLRTPSTEAAHIMLRDQEPSLSSHVDPTKVYRKDPYPEEMMRQNHVLKQPAVSHPGHRPDKEPNLTYEPQLPYVEKQASRDLEQPTYRYESSSYTDQFSRNYEHRLRYEDRVPMYEEQWSYYDDKQPYPSRPPFDNQHSQDLDSRQHPEESSERGYFPRFEEPAPLSYDSRPRYEQAPRASALRHEEQPAPGYDTHGRLRPEAQPHPSAGPKPAESKQYFEQYSRSYEQVPPQGFTSRAGHFEPLHGAAAVPPLIPSSQHKPEALPSNTKPLPPPPTQTEEEEDPAMKPQSVLTRVKMFENKRSASLETKKDVNDTGSFKPPEVASKPSGAPIIGPKPTSQNQFSEHDKTLYRIPEPQKPQLKPPEDIVRSNHYDPEEDEEYYRKQLSYFDRRSFENKPPAHIAASHLSEPAKPAHSQNQSNFSSYSSKGKPPEADGVDRSFGEKRYEPIQATPPPPPLPSQYAQPSQPVTSASLHIHSKGAHGEGNSVSLDFQNSLVSKPDPPPSQNKPATFRPPNREDTAQAAFYPQKSFPDKAPVNGTEQTQKTVTPAYNRFTPKPYTSSARPFERKFESPKFNHNLLPSETAHKPDLSSKTPTSPKTLVKSHSLAQPPEFDSGVETFSIHAEKPKYQINNISTVPKAIPVSPSAVEEDEDEDGHTVVATARGIFNSNGGVLSSIETGVSIIIPQGAIPEGVEQEIYFKVCRDNSILPPLDKEKGETLLSPLVMCGPHGLKFLKPVELRLPHCDPKTWQNKCLPGDPNYLVGANCVSVLIDHF

SEQ ID NO: 595 - DNA, 781 bp, Homo sapiens
  CDS (1)..(627)
atgctttctgtggacaccactgagctctgcctcaactccaccctctgcgaccggaggactatgcccctactcccggaagccctcggacaaggaactgtagcccatgtaccgcgtgacgtgagagcggagcccgggtctgcccgggcgcgggcccgcggccacggcgtttggatcccagatcccagcccccgcgctcagtccgggcttcctgaccggcgctctccgcgtcccttctcgcgcgcccttacctggggctggggaggtggggacagagccgggcgcagtcgggggcacagccctgaggcggggctgagggccaggccgccacgtccctggaccctgaaaacgggctcggacccccgctgcagcgtggactccggtgtggccgcggggcgtgcaacccggaccctggccagctccgtgtcctccagacctttactcatgtccccgcatcgccaggccgagctgcaccttcggtccccgcccgcggcagccgaggagaggagagcaaggcccagaccggggaggaacccacacagcctctgtgctccagcctgcttgaaagacaaggtctacctacaacgcagagatgcacacattaaggacaatgaaacacccaagtgttaggaaccagaataatcagccctaatagaggggaggctgatcagggagggcctcctggaggaggaggcacaacatcagggtgcactgtgatttctggagacccaaggagttctggtaaatgacaggtgagaaaaagaaaatgtaataaaatataatt

SEQ ID NO: 596 - protein, 208 aa, Homo sapiens
MLSVDTTELCLNSTLCDRRTMPLLPEALGQGTVAHVPRDVRAEPGSARARARGHGVWIPDPSPRAQSGLPDRRSPRPFSRALTWGWGGGDRAGRSRGHSPEAGLRARPPRPWTLKTGSDPRCSVDSGVAAGRATRTLASSVSSRPLLMSPHRQAELHLRSPPAAAEERRARPRPGRNPHSLCAPACLKDKVYLQRRDAHIKDNETPKC

SEQ ID NO: 597 - DNA, 2489 bp, Homo sapiens
  CDS (239)..(955)
agtctcttcagttccttccgcgtcgtttcttggctgtttccgcccagctcctttgtgccgcgcagaacaacgagatgacgcatgcgcaaagcgcagcggccgcatatataaacgcgaacccgggctcttcctcgtagtgccgccgggactcttggcgggtgaaggtgtgtgtcagcttttgcgtcactcgagccctgggcgctgcttgctaaagagccgagcacgcgggtctgtcatcatgtcgcgttacgggcggtacggaggagaaaccaaggtgtatgttggtaacctgggaactggcgctggcaaaggagagttagaaagggctttcagttattatggtcctttaagaactgtatggattgcgagaaatcctccaggatttgcctttgtggaattcgaagatcctagagatgcagaagatgcagtacgaggactggatggaaaggtgatttgtggctcccgagtgagggttgaactatcgacaggcatgcctcggagatcacgttttgatagaccacctgcccgacgtccctttgatccaaatgatagatgctatgagtgtggcgaaaagggacattatgcttatgattgtcatcgttacagccggcgaagaagaagcaggtcacggtctagatcacattctcgatccagaggaaggcgatactctcgctcacgcagcaggagcaggggacgaaggtcaaggtcagcatctcctcgacgatcaagatctatctctcttcgtagatcaagatcagcttcactcagaagatctaggtctggttctataaaaggatcgaggtatttccaatccccgtcgaggtcaagatcaagatccaggtctatttcacgaccaagaagcagccgatcaaagtccagatctccatctccaaaaagaagtcgttccccatcaggaagtcctcgcagaagtgcaagtcctgaaagaatggactgaagctctcaagttcaccctttagggaaaagttattttgtttacattattataagggatttgtgatgtctgtaaagtgtaacctaggaaagataattcaaccatctaatcaaaatggatctggattactatgtaaattcacagcagtaagataatataaattttgttgaatgtattaacatcatatggtctgaaaatgtgggtttttatttggcacatttaaataaaatgtttctaactagatttttgatttgtgttcaatattaacacttcttaatttgatatatttgagagtcagacattataattgttaaccttattcatacatacctacattcagaattgaaaggtgttggttaagtcttgaacatcactattctatgcataaaacttggccaggatcttaagggactttgaaaattccatcttacccttgtagctctgggtaagatgacctgagtcccttatgatacagcctgaatgcatcatgacagatccttaagttagctaatccgtttgaagttggtgttagtaggtattgtatgatcagtggtgaagcaagtaggaccactgatgtgtctaaatgagcatgacaggaactaaacgaaactgattaaatgtatgagaaatagaaacatttctggatgatctttatactaattgcagctttcaggctactaggtggcatagtgttaattaggactccccaagatatggggagttctactctcaatggtcttgtttctttgctttctacattagttaaccagttttataccaaaaaatgcatgtttgaggaattgtctgaaattgggacaaaacaccttcatgtaaaccagctttgcaaaattttccagcccagatactcttcatctattcaaatggattgtcttattctgagcaaagacctgttgttaatcttcaagctaggttttgcagttcccaaccacaacattcttctattttgccaggctggtgcaaagtaattaaagatgtcaatcagaaatgtcaatgagactaaagtggttttgtaaatctcagctatatttagcaacactccatgtagctaatattttttggtagcatctggtagaccttagaatgttacatagccagtaggttctttattcaaattttaagtatcttaagaatagtagggcagtaacagttacttttgagagttttctggtcaagcttttaccaggcattctctagccttggtacaaaaaaaaaaaaacctgctggttgcgcagatacctaggcttgtccattttatgcatttcagcaaagtcattggatactattgcaacttgggaatactggtctgcatcaagtttattcggtagtttgaccgctagtatgttggaagttatttggattgtttttggaattttgactggctgaattatggttggtataaagttatgtgtataactggcaggcttatttatctgttgcacttggttagctttaattgttctgtattatttaaagataagtttactcaacaataaatctgcagagattgaacaaataa

SEQ ID NO: 598 - protein, 238 aa, Homo sapiens
MSRYGRYGGETKVYVGNLGTGAGKGELERAFSYYGPLRTVWIARNPPGFAFVEFEDPRDAEDAVRGLDGKVICGSRVRVELSTGMPRRSRFDRPPARRPFDPNDRCYECGEKGHYAYDCHRYSRRRRSRSRSRSHSRSRGRRYSRSRSRSRGRRSRSASPRRSRSISLRRSRSASLRRSRSGSIKGSRYFQSPSRSRSRSRSISRPRSSRSKSRSPSPKRSRSPSGSPRRSASPERMD

SEQ ID NO: 599 - DNA, 1784 bp, Homo sapiens
  CDS (112)..(1500)
cgggattaccgagggggtgcgggatgctgatgctgaactggccaagctgggagggaagaagaaagggaggggaggggagaatcgaggacggacggcctagccaggccaagaatgcaattgccccggtggtgggagctgggagacccctgtgcttggacgggacagggtcgggggacacgcaggatgagccccgcgaccactggcacattcttgctgacagtgtacagtattttctccaaggtacactccgatcggaatgtatacccatcagcaggtgtcctctttgttcatgttttggaaagagaatattttaagggggaatttccaccttacccaaaacctggcgagattagtaatgatcccataacatttaatacaaatttaatgggttacccagaccgacctggatggcttcgatatatccaaaggacaccatatagtgatggagtcctatatgggtccccaacagctgaaaatgtggggaagccaacaatcattgagataactgcctacaacaggcgcacctttgagactgcaaggcataatttgataattaatataatgtctgcagaagacttcccgttgccatatcaagcagaattcttcattaagaatatgaatgtagaagaaatgttggccagtgaggttcttggagactttcttggcgcagtgaaaaatgtgtggcagccagagcgcctgaacgccataaacatcacatcggccctagacaggggtggcagggtgccacttcccattaatgacctgaaggagggcgtttatgtcatggttggtgcagatgtcccgttttcttcttgtttacgagaagttgaaaatccacagaatcaattgagatgtagtcaagaaatggagcctgtaataacatgtgataaaaaatttcgtactcaattttacattgactggtgcaaaatttcattggttgataaaacaaagcaagtgtccacctatcaggaagtgattcgtggagaggggattttacctgatggtggagaatacaaacccccttctgattctttgaaaagcagagactattacacggatttcctaattacactggctgtgccctcggcagtggcactggtcctttttctaatacttgcttatatcatgtgctgccgacgggaaggcgtggaaaagagaaacatgcaaacaccagacatccaactggtccatcacagtgctattcagaaatctaccaaggagcttcgagacatgtccaagaatagagagatagcatggcccctgtcaacgcttcctgtgttccaccctgtgactggggaaatcatacctcctttacacacagacaactatgatagcacaaacatgccattgatgcaaacgcagcaatggagtttcgctcctgttgcccaggctggagtgcaatggagcgatcttggctcactgcagcctccgcctcccaggaacttgccacatcagactcagattccccaacagcagactacaggtaaatggtatccctgaagaaagaaaactgactgaagcaatgaatttataatcagacaatatagcagttacatcacatttcttttctcttccaataatgcatgagcttttctggcatatgttatgcatgttggcagtattaagtgtataccaaataatacaacataactttcattttactaatgtatttttttgtacttaaagcatttttgacaatttgtaaaacattgatgactttatatttgttacaataaaagttgatctttaaaataaatattattaatgaagcctaaaaaaaaaaa

SEQ ID NO: 600 - protein, 462 aa, Homo sapiens
MQLPRWWELGDPCAWTGQGRGTRRMSPATTGTFLLTVYSIFSKVHSDRNVYPSAGVLFVHVLEREYFKGEFPPYPKPGEISNDPITFNTNLMGYPDRPGWLRYIQRTPYSDGVLYGSPTAENVGKPTIIEITAYNRRTFETARHNLIINIMSAEDFPLPYQAEFFIKNMNVEEMLASEVLGDFLGAVKNVWQPERLNAINITSALDRGGRVPLPINDLKEGVYVMVGADVPFSSCLREVENPQNQLRCSQEMEPVITCDKKFRTQFYIDWCKISLVDKTKQVSTYQEVIRGEGILPDGGEYKPPSDSLKSRDYYTDFLITLAVPSAVALVLFLILAYIMCCRREGVEKRNMQTPDIQLVHHSAIQKSTKELRDMSKNREIAWPLSTLPVFHPVTGEIIPPLHTDNYDSTNMPLMQTQQWSFAPVAQAGVQWSDLGSLQPPPPRNLPHQTQIPQQQTTGKWYP

SEQ ID NO: 601 - DNA, 2126 bp, Homo sapiens
  CDS (189)..(863)
aatgatgctgatctgaagaaatgaataatgtgagcattaggggcggcagtgggattactcagtgttgagagaaacaacacggaaagcccagagcagaggagggagaaggccccattctctcagctttaatctactgcacctcggagggcagagctctaaccagacacgctgcaagcatcagaatcgggatgaacatcgaggtggggaacatttcttatacaggagccatcatctcctggtcgtcctcggagccctgcctggaggactattaccatattatgtacaggcccaactggaacagcatcttctctggctatcttcgctacagcttccaccacgaggagaaggtgcctcgaacgatcagctccgtggtgctggaacatcttgccccttccactctctacttcctgtgcatcagctgtaagaaggctgccttcccttacaggcactactgcaccatgttccacaccctggataagagtccgctggctcctggaagctccctggtagacccccagatctccctttgggtgctgatggccattctgctggcctgcttcacagccgtcttggccttcatctgcctccagttctggtgtgtccgttgccatgagccgcgatggtcttacagggctggccacatggaggaggccaatgggttggtgagatggccagaggaggccccggatcttggtcagagggaggaagacctgcaggggctccccctggtggaaatgccacgcaagaactccagagatggagctgaactggatcccgaagccaaccaggatgcccctgatgcgggtgccttacagagggggggtggtgacccacccgctatactgcctcattgtggggaatgagagtggggaggagagcgcccgcatcatgtagcctaaagctttccacacagtaggtcgtttgtacaaatgtgtctatagactacccatttctctcccatcaaacgtcactgctattgtaggtcacctgggttggatgaatgccccatgacaaagcttctcaagctggaaaatgtatcccccagggtatgccaaggcacaaacgaggcatctcagcagcagcgtccactcggaggacacagttaagaattgaaagcattgttttaacattaaaacaaacatggatatgttataaagtagaaagcaaaaatttgcatgacaaataaaacacagcacttgaaggaaacacttgagttacaagtaggctctcagaggtacacttttgggcaaaggtagatgtccagtttcctctgcccttgaggggattatttggaaataatttgggattatttggaaataatttgtgagaacccttgctctggagtgttttccaacttttaggcaatcacataccaccgctctctattttttaaaaccatggattatcttcactattattaataatactttcctttaaattgactcattttttaagcgtaaacttattttcaaagacagccttatattactccataagtgaaaaaccagcaccctcctgctgcaaacagaagggaagagacataagaataaacatcatgaaaacaagataatattaaataatctgacttagcttctattgcctgccagtgattctgagcttaatgcctgcttgcttgtctttgataaaaagggagatccagtgttggagaggtaataaagacatattagcaccaatatttgtctttctccttgatatagcataaggtttgaaagagaatcgaaaagggaagtgctgtttttactttgcgagtcagtgttagttaaatgccatgtctgtgaaccacctcaaatgctgtcagtcagcttcccttgatttgagaaaattgtcttgaccagactaggcaggctgttctggagaagacgcctgtactctccaagcatcatccaagaccttcccagtaccctcttatatctatagagcacaaaatcccagaatcacaggacgacactgcagtgaatcaactaagaaacagcaggagctgagaagccaagacgagaagccccacatccctattcccttgcctacctcatgcattccctgctcggcacccagacttttgcccccattcctgctacttgtgaacaaataaagattcatatactcac

SEQ ID NO: 602 - protein, 224 aa, Homo sapiens
MNIEVGNISYTGAIISWSSSEPCLEDYYHIMYRPNWNSIFSGYLRYSFHHEEKVPRTISSVVLEHLAPSTLYFLCISCKKAAFPYRHYCTMFHTLDKSPLAPGSSLVDPQISLWVLMAILLACFTAVLAFICLQFWCVRCHEPRWSYRAGHMEEANGLVRWPEEAPDLGQREEDLQGLPLVEMPRKNSRDGAELDPEANQDAPDAGALQRGGGDPPAILPHCGE

SEQ ID NO: 603 - DNA, 4698 bp, Homo sapiens
  CDS (252)..(1184)
gttggtgaagagatcaggaagagatttcttcgagactaaggatggatgacccttagcaacagtgaccgtctcctcccggcatagcaagatggcctgccctcaggtacaggaagaaggaatggaatcggaaggaagaaaattcattccagagacaaaatagctcccctcctctgttgtagctgttcctctggcaatacaaactttctgctttcaggttctgcagcattccagaccttgagcactgaatcaggatgggaaaaagacgttgtgttcctccactcgagcccaagttggcagcaggctgttgtggggtcaagaagcccaaattatctggaagtggaacgcacagtcacgggaatcagtccacaactgtccccggctctagttcaggacctcttcaaaaccaccagcatgtggacagcagcagtggacgggagaatgtgtcagacttaactctgggacctggaaactctcccatcacacgaatgaatcccgcatcgggagcgctgagccctcttccccggcctaatggaactgccaacaccactaagaatctggtggtgactgcagagatgtgctgctactgcttcgacgtactctactgtcacctctatggcttcccacagccacgacttcctagattcaccaatgacccctatccgctctttgtgacgtggaagacagggcgggacaagcggcttcgtggctgcattgggaccttctcagccatgaatcttcattcaggactcagggaatacacgttaaccagtgcacttaaggacagccgatttccccccctgacccgagaggagctgcctaaacttttctgctctgtctccctccttactaactttgaggatgccagtgattacctggactgggaggtaggggtccatgggattcgaattgaattcattaatgaaaaaggtgtcaaacgcacagccacatatttacctgaggttgctaaggaacaagactgggatcagatccagacaatagactccttgctcaggaaaggtggctttaaagctccaattaccagtgaattcagaaaaacgatcaaactcaccaggtaccgaagtgagaaggtgacaatcagttacgcagagtatattgcttcccgacagcactgtttccagaacggcactcttcatgccccgcccctctacaatcattactcctgacacacggctgcatgaccagtcccacccccccgtggccaccaatggctatgacatcattggagcagatgcctcctcttcctggtccagttacttctattactgcaccattttatgatgctagcttccgttgccaagtctgcctcccgctgactgagggagggtagggttaccttgaacgaaacagaacttgaggggcccaagccttatctcagcctttcctcaatatggggttccgttggattggggctcctccatgactagtgggaattactgtgggttcagaagacccttgtctggtatttgccacatggggtattggccacacgctggaagctgaaattgatgatccctgaaggttgaacccacacacacccctgcagcctccccagatgaagtaggtgtattcccctggcagtctgggcaacggagaccaagaaacatttttaggttgttttaaattcctttttttaaacttccagtttattgcgtaccaagagttgattacaacctccatgcttcataagcggacgccacgttagggttggacgtgggcaccacgagtcctttgaggctcctggacagagacccacatcaagatcggaagccctttgggtggcgttgcagatctcattgctcagtaggccgtgaagattttcatcctcatcccactctcagttggattttctggcactcttcctgcattgagtctcctgattactgaacagagctccgtcatgtagcctgctgaggaatggaatggaatggagatgcccacaggaggtcctgatgtcatcactgcacgcaggtgtgagaggagagacctcttctgcaccgcctggctacctcactcctctgctggtagcagtgcctatagctggacctaagttctcagaagcgtagatgtgcaaacaagcgattgagttgggctttaggaggacacatcataggagagaatccagggtctgtaagctggttttcttttcaggtgacatcctgaggggcctgtaagcaggggagctcctttttctagtttgcctgtagaggtgggaagactgttggtgtttctgtcctttacaggacattaggaaacagttgtgtaattacacaaggtggacctttatcttgcctgacatgctgggaatcttcaccccaccagggcaaatttccaaatagctcattttattctaggtctttcaaactttcatgtgacatatttccctttcccattgttgctgatttccaaatcgctgtcagcaattttttcctctctccttgcctattcttcactcatttggtggcaaagttcatagaactaggggacttggaagatgctttgaaaatattgttacaaaggcactgctaaaatgattcacagggagagtggccagttggaagaaggatcctaaggatgtgacactggttttcaacaacatgcttagagaactcatgaagtggattgggtgtcaacccagtgaacatgtttttatttaatttattttttgaagtttatgtggtgatggtgtggctttccgaaatgggcaaatattcagaagatcttttgcattttcttctgtcaggaatggggaaggggagtgggggcacaatctgagaaaggacacctgtgctgttctaggcatcgctggcaagtttgtgggaagggatgggcaagggtgagtgggtttgctccacaccgtcctgtgctgctcgagaggacctgggacgtgcgagggaaacgtgggtgacggtgcctaggctgcggcccttcactgctgtgctgggttcctgcagcctgctacgtttcccttggcaatgtaaatgaagatggaggggtcgtttcgtgatttcctgctgctgagaataaatgtcttgttaaaaacgtggcaacggttactcttaggtgccatggatcgatgtcagggtggtcagctctggactaagccacccacctccaatttgtacaacagtattgatacatagggctacactcattactgttcaagtgttctatgttaagagttgtgtttaatttctaaagattaaaaaaagcaaaaaaattggtgctaaaccttcacccctgagcacgctcagtgagactggtcatgcaagcatttacagtgccatgctcctcaagccgattttttcttgtagaaatgttgccctatttgtcttctccaatgtatggtatgttattttattttattattttattttattttattttattttatcgagggggggtacgatacctgccatttaagaaaatgaatagaaaattttaaaacccgagaaatggggaaaaaaaaatcagtgcacaagaattgggctggttaggcccagcaccacactgaagtgggctcagtggtttttggagtgaagaagccttactccctgcacattccctcatgctcccacacaagtccagcaatggaaatgcttgggttcctcttgctttgtcaggggactcaggagtcgaccaagggaaaccatttggccccgtgaggaatgggcattgtcagtatccgtcctgaacggggcctagtcaggaagcggtctagaagtgtacggtcacggtcgcctcatgaaagtgtgtagcaggtggctctcaggaaaaataccaagtctggatcatccatgtggcagctttgcatagggagaggatagctccgaactggaactgaactgccttctctgcacgcttgaccaaagcagtgatgagggcggccagtacctgcggtgtgcgtggtaggtttaaagaaaagggaatgttttctgctgagtgtttcctttgtccttgggctgctcgagctggacagtaggtaaccactgttttcaaggaccagcccaatttctctggcttggttcggagttcgtttcatccctagctgtgagtgccttttggtctggaaagttggcttgtctcataatacccacagctaggacattctctctgtaattatgaattgtccttgttttacattaaaagagaatgtctttgatcactagagtctgtcggtgttggattatttccactgtgagattcttaaaacttttttgcttcataataataaaacaactcatgttagagaccctttcaacatgaaaggtttgtagttgagacattacatatattttattgtttataataaaaatcatctatacaaaagaagtcctgggtgttaatattttgcacaagatctgttttccatgatgtgttgacatctacaatttcactaactgttgacgttattttctattgagattctggagcctagggagctatgtgttctttttgttcatttcgttcttacttccctgaagcaagagactatatggccttcagtgcaaagacttcagaccaattctttgtattacacttggttgcctcttggctatataacttctgagtgcaaatcattgaacactttaacgaagtattgtagagaataaatcataatggataaaaaaaaaaaaaaaaaaaaaaaaaaaaaaaaaaaaaaaaaaaaaaaaaaaaaaa

SEQ ID NO: 604 - protein, 310 aa, Homo sapiens
MGKRRCVPPLEPKLAAGCCGVKKPKLSGSGTHSHGNQSTTVPGSSSGPLQNHQHVDSSSGRENVSDLTLGPGNSPITRMNPASGALSPLPRPNGTANTTKNLVVTAEMCCYCFDVLYCHLYGFPQPRLPRFTNDPYPLFVTWKTGRDKRLRGCIGTFSAMNLHSGLREYTLTSALKDSRFPPLTREELPKLFCSVSLLTNFEDASDYLDWEVGVHGIRIEFINEKGVKRTATYLPEVAKEQDWDQIQTIDSLLRKGGFKAPITSEFRKTIKLTRYRSEKVTISYAEYIASRQHCFQNGTLHAPPLYNHYS

SEQ ID NO: 605 - DNA, 4072 bp, Homo sapiens
  CDS (267)..(1829)
tttccgggccgagtgtttccgggtcgctgctggcccccgggtactggtctcagtacccctgcagccggccggagaggctagagcccgacggggcccggctccggcggcagccgcgcctctcgcttgcttccctcggccgggccgtcctcggcggcagtgtcaggagcactccgctggtccaggcggcaacatgtccatgcttttagtgatgtccctgcctctaatccagaagccatggaggagataaggtagcccccctcgatcggatggggaagcccagttcaatggatactaaattcaaggatgacttatttcggaagtacgtgcagttccatgagagcaaagtggataccaccaccagcaggcagcggcctggcagcgatgagtgcctgcgggtggcagcctcaaccctgctcagcctgcacaaggtggatcccttttatcgattccggctgatccagttctatgaggtggtggagagctccttgcgctcgctcagctcctctagcctgcgggctctgcacggcgccttcagcatgctggagacggtgggcatcaacctcttcctctacccgtggaagaaggaattcagaagcatcaagacctacacgggcccttttgtttattatgtcaagtcgacattactggaagaggacatccgagccatcctgagctgcatgggctacacacctgagctgggcactgcatacaagctcagagagctcgtggagaccctccaggtgaagatggtctcctttgagctctttctggccaaagtcgagtgtgagcagatgctagaaatccactcacaagtgaaggacaagggctactccgagctggacattgtgagcgagcgcaagagcagtgcagaggatgtgcgcggctgctcggacgccctgcggcggcgggcagagggccgggagcacctgacggcctccatgtcacgagtggcactccagaagtcggccagcgagcgggcggccaaggactactacaagccccgcgtgaccaagccctcgaggtcagtggatgcctatgacagctactgggagagccggaagccacccctgaaggcctcattgagtcttcggaaggagcctgtggcaacggatgtgggggacgacctcaaggatgagatcatccgcccatccccttcgctgctgaccatggccagctccccccacggcagcccggatgtgcttccacccgcctcccccagcaacggcccggccctgctgcgcggtacctacttctccactcaggatgacgtggatctgtacacagactctgaacccagggccacctaccgtcggcaggatgctctgcggccggatgtgtggctgctcagaaacgatgcccactccctctaccacaagcgctcgccccctgccaaagagtccgccctctccaagtgccaaagctgcgggctgtcctgcagctcctccctctgccagcgctgtgacagcctgctcacctgtcctccagcttccaagcccagcgccttccccagcaaggcctcgactcatgacagcctggcccacggggcatctctgcgggagaagtacccaggccagactcagggcctcgaccgcctcccgcaccttcactccaaatccaagccctccaccacgcccacttcccgctgtggcttctgcaaccgcccaggcgccaccaacacctgcacccagtgttcaaaagtctcatgtgacgcctgcctcagcgcttaccattatgacccctgctacaaaaagagtgagctgcacaagttcatgcccaacaaccagctgaactacaagtccacccagctctcccatctcgtgtacagatagaccggcctcgccccttccagctccaagggctacatcaaccgacctttcgggtttcacggtgaagaagtactaacgcattgatctcagaggcggaggcctgcacttgaccatgtaggtggcagagatcgtgggctggctgtgtccacgtgggagttcacttagcgactcagatatctcaaccaatggctgctttgttgtctgacaagggagaaggtggcacttccgttcagattcattttgctaatctctccactccctgttcagttggttctttttttggggttttgttttgttttgttttgttgttttgttttttcctttaaagaggatttctgtctctgggaccctcgctgcacctacccctcccattgcaaagccaacttggactgggaagggcccttcaggtcaccaaacatccacctggagcggcgagctagaggcctgttggcttgtgaaatgagccctcctgccacacggggcctctcccaaaggctcatcccttggccgcccccttcctaaacacaaggatccccagctggactccccaccccctggcttccccacctctccaggtgtcaaaggtgaaccgagtccagtattagctgaatgtcatttcgtacaccacagctcagtcagcccatggccttcgtgaactttgctccaacacactgatgtgtgggcttcccacagcaggactgacttccccctttctgttgtttgcacatgcccctcttactgtactgtcaatagatatttttgagatttatttttaaataaatattcaacttgctgtgtgtttcaacgtggttaaaaaaatgaattatgtagctatttattaaatgccctgggttctttagtcttccaagggagggcctcgcgcccattcgtgttgtatcctccactcactatggcccgaggggagaggagagtttggggcagggaggaacagacatgaagcctccttttcttgagctggtggagagccactgtcttccctgcagtaactatctatacacctacctccagtgtgcacttagggggtgagcgcgggtgtcgaggtctgtgtgtctgcagactgctaacctatgacaattcagggacctcacctgtcggacctatagcttgctgagcaggaaccttgcacttcacacttcttgagtctcgtttcagaaggaaaatcatttgggattcctactgcccctccatctcaatcctcttctcttcaccagtttccaggactcatctgcaacatttgcaatctttttgcactaaaagtgggcaggagtcggcatgtgcccatcagagagacggctcctcagatgctcagctaagcctaagcgcttccaagcctgaaggccccttcagcttctcatgtgaattaccaacccctggattttccttgtgggggtacaagagcaggagtggggcaagagtttgaaaataaagccgcttccttgtgaactaactatattttagccataactgtttgtgatgtacacaatgttaagggatttatatgcagtgggcttttctgggagaaagttattcagctcttgagcaagtttaagtctggctgaatcctgaggccactgtgaatttgctgatgttcttccaactcagttgagtgattttaaggttttccaaatcttctatggctctctttttaatatatatatatatatatatatatatatatatatatatatatatatatatctatctggtagatcacatgtagatgtacagtgtgtatattaagctgaatttcaaccaactttattactaagaccagcctagcagggcattcatctttgatgttcttccttttcacatttcagaatcggcaatgcctggcccactcctgagagctctagttttctagttttccatttccagattgcgccagcattacagtaactaactctttctaaccaaccgtgatgccacgtaacttaccctatggacaaaagcaggaatgactaacacatcctaggagggaaagtccagtgtacctgtcatcacggacgcactgtggtcacagactggaatacgaaatactacagccctgctcccaggtgtgcatcttactggatgaggttgctgtgattgagatagttaaatacatgctaatttaaaaatgcagatgttttacatttgatttctaccaagagttgaaatgttgagagatgattaaaaataataataataaagtgtcttccattgttaaaaaaaaaaaaaaaaaa

SEQ ID NO: 606 - protein, 520 aa, Homo sapiens
MGKPSSMDTKFKDDLFRKYVQFHESKVDTTTSRQRPGSDECLRVAASTLLSLHKVDPFYRFRLIQFYEVVESSLRSLSSSSLRALHGAFSMLETVGINLFLYPWKKEFRSIKTYTGPFVYYVKSTLLEEDIRAILSCMGYTPELGTAYKLRELVETLQVKMVSFELFLAKVECEQMLEIHSQVKDKGYSELDIVSERKSSAEDVRGCSDALRRRAEGREHLTASMSRVALQKSASERAAKDYYKPRVTKPSRSVDAYDSYWESRKPPLKASLSLRKEPVATDVGDDLKDEIIRPSPSLLTMASSPHGSPDVLPPASPSNGPALLRGTYFSTQDDVDLYTDSEPRATYRRQDALRPDVWLLRNDAHSLYHKRSPPAKESALSKCQSCGLSCSSSLCQRCDSLLTCPPASKPSAFPSKASTHDSLAHGASLREKYPGQTQGLDRLPHLHSKSKPSTTPTSRCGFCNRPGATNTCTQCSKVSCDACLSAYHYDPCYKKSELHKFMPNNQLNYKSTQLSHLVYR

SEQ ID NO: 607 - DNA, 3754 bp, Homo sapiens
  CDS (214)..(2430)
ccaggccccattgttcccggtttccagccatggctgccattacctgaccagcgccacagccggtctctctgcaggcgccgggagaagtgaccagagcaatttctgcttttcacagggcgggtttctcaacggtgacttgtgggcagtgccttctgctgagcgagtcatggcccgaaggcagaactaactgtgcctgcagtcttcactctcaggatgcagccgaggtgggcccaaggggccacgatgtggcttggagtcctgctgacccttctgctctgttcaagccttgagggtcaagaaaactctttcacaatcaacagtgttgacatgaagagcctgccggactggacggtgcaaaatgggaagaacctgaccctgcagtgcttcgcggatgtcagcaccacctctcacgtcaagcctcagcaccagatgctgttctataaggatgacgtgctgttttacaacatctcctccatgaagagcacagagagttattttattcctgaagtccggatctatgactcagggacatataaatgtactgtgattgtgaacaacaaagagaaaaccactgcagagtaccagctgttggtggaaggagtgcccagtcccagggtgacactggacaagaaagaggccatccaaggtgggatcgtgagggtcaactgttctgtcccagaggaaaaggccccaatacacttcacaattgaaaaacttgaactaaatgaaaaaatggtcaagctgaaaagagagaagaattctcgagaccagaattttgtgatactggaattccccgttgaggaacaggaccgcgttttatccttccgatgtcaagctaggatcatttctgggatccatatgcagacctcagaatctaccaagagtgaactggtcaccgtgacggaatccttctctacacccaagttccacatcagccccaccggaatgatcatggaaggagctcagctccacattaagtgcaccattcaagtgactcacctggcccaggagtttccagaaatcataattcagaaggacaaggcgattgtggcccacaacagacatggcaacaaggctgtgtactcagtcatggccatggtggagcacagtggcaactacacgtgcaaagtggagtccagccgcatatccaaggtcagcagcatcgtggtcaacataacagaactattttccaagcccgaactggaatcttccttcacacatctggaccaaggtgaaagactgaacctgtcctgctccatcccaggagcacctccagccaacttcaccatccagaaggaagatacgattgtgtcacagactcaagatttcaccaagatagcctcaaagtcggacagtgggacgtatatctgcactgcaggtattgacaaagtggtcaagaaaagcaacacagtccagatagtcgtatgtgaaatgctctcccagcccaggatttcttatgatgcccagtttgaggtcataaaaggacagaccatcgaagtccgttgcgaatcgatcagtggaactttgcctatttcttaccaacttttaaaaacaagtaaagttttggagaatagtaccaagaactcaaatgatcctgcggtattcaaagacaaccccactgaagacgtcgaataccagtgtgttgcagataattgccattcccacgccaaaatgttaagtgaggttctgagggtgaaggtgatagccccggtggatgaggtccagatttctatcctgtcaagtaaggtggtggagtctggagaggacattgtgctgcaatgtgctgtgaatgaaggatctggtcccatcacctataagttttacagagaaaaagagggcaaacccttctatcaaatgacctcaaatgccacccaggcattttggaccaagcagaaggctagcaaggaacaggagggagagtattactgcacagccttcaacagagccaaccacgcctccagtgtccccagaagcaaaatactgacagtcagagtcattcttgccccatggaagaaaggacttattgcagtggttatcatcggagtgatcattgctctcttgatcattgcggccaaatgttattttctgaggaaagccaaggccaagcagatgccagtggaaatgtccaggccagcagtaccacttctgaactccaacaacgagaaaatgtcagatcccaatatggaagctaacagtcattacggtcacaatgacgatgtcagaaaccatgcaatgaaaccaataaatgataataaagagcctctgaactcagacgtgcagtacacggaagttcaagtgtcctcagctgagtctcacaaagatctaggaaagaaggacacagagacagtgtacagtgaagtccggaaagctgtccctgatgccgtggaaagcagatactctagaacggaaggctcccttgatggaacttagacagcaaggccagatgcacatccctggaaggacatccatgttccgagaagaacagataatccctgtatttcaagacctctgtgcacttatttatgaacctgccctgctcccacagaacacagcaattcctcaggctaagctgccggttcttaaatccatcctgctaagttaatgttgggtagaaagagatacagaggggctgttgaatttcccacataccctccttccaccaagttggaacatccttggaaattggaagagcacaagaggagatccagggcaaggccattgggatattctgaaacttgaatattttgttttgtgcagagataaagaccttttccatgcaccctcatacacagaaaccaattttcttttttatactcaatcatttctagcgcatggcctggttagaggctggttttttctcttttcctttggtccttcaaaggcttgtagttttggctagtccttgttctttggaaatacacagtgctgaccagacagcctccccctgtcccctctatgacctcgccctccacaaatgggaaaaccagactacttgggagcaccgcctgtgaaataccaacctgaagacaccgttcattcaggcaacgcacaaaacagaaaatgaaggtggaacaagcacagatgttcttcaactgtttttgtctacactctttctcttttcctctaccatgctgaaggctgaaagacaggaagatggtgccatcagcaaatattattcttaattgaaaacttgaaatgtgtatgtttcttactaatttttaaaaatgtattccttgccagggcaggcaaggtggctcacgcctgtaatcccagcacttcaggaggctgaggtgggcggatcacctgaggtcaggagtttgagaccagcctgatgaaaccctgtctctactaaaaatacaagaattagccgggcgtggtggcgcatgcctgtagtatcagctactcaagaggctgaggtgagattatcgcttgaacccaggaaacggaggttgtagtgagcggagatcgcgccactgcactccagcctgagtgacagagtgagaatccatctcaaaaaaaacaaaaaacaaaattgcttgctaaagaagtggtctcctgaggtcttaagacattcctgacagtgtcttgagtgggtgggagagaggctgctgtcattgcgctgtggaatttcacagatgagaaccacgcctagccaaaatcacttttcctgtttgcctcagtgacacagctgcagggaccctcgtggatgttgtattaaataaatttgacctttgctctttgcaaaaaaaaaaaa

SEQ ID NO: 608 - protein, 738 aa, Homo sapiens
MQPRWAQGATMWLGVLLTLLLCSSLEGQENSFTINSVDMKSLPDWTVQNGKNLTLQCFADVSTTSHVKPQHQMLFYKDDVLFYNISSMKSTESYFIPEVRIYDSGTYKCTVIVNNKEKTTAEYQLLVEGVPSPRVTLDKKEAIQGGIVRVNCSVPEEKAPIHFTIEKLELNEKMVKLKREKNSRDQNFVILEFPVEEQDRVLSFRCQARIISGIHMQTSESTKSELVTVTESFSTPKFHISPTGMIMEGAQLHIKCTIQVTHLAQEFPEIIIQKDKAIVAHNRHGNKAVYSVMAMVEHSGNYTCKVESSRISKVSSIVVNITELFSKPELESSFTHLDQGERLNLSCSIPGAPPANFTIQKEDTIVSQTQDFTKIASKSDSGTYICTAGIDKVVKKSNTVQIVVCEMLSQPRISYDAQFEVIKGQTIEVRCESISGTLPISYQLLKTSKVLENSTKNSNDPAVFKDNPTEDVEYQCVADNCHSHAKMLSEVLRVKVIAPVDEVQISILSSKVVESGEDIVLQCAVNEGSGPITYKFYREKEGKPFYQMTSNATQAFWTKQKASKEQEGEYYCTAFNRANHASSVPRSKILTVRVILAPWKKGLIAVVIIGVIIALLIIAAKCYFLRKAKAKQMPVEMSRPAVPLLNSNNEKMSDPNMEANSHYGHNDDVRNHAMKPINDNKEPLNSDVQYTEVQVSSAESHKDLGKKDTETVYSEVRKAVPDAVESRYSRTEGSLDGT

SEQ ID NO: 609 - DNA, 4752 bp, Homo sapiens
  CDS (85)..(924)
agtgtgcaggcaggcgggggtgcgcggggcggtcagcgatctgcagcttcgcggggacagagatgtaacccaactcgttcacggatgttccgcgcgccgtgtcaccggctgcgggccaggggtactcggaaggcgcgggcaggagcctggcgaggatgcaccttcccctgccttggaaagggaatggagaggccggcggcccgggagccgcatgggcccgacgcgctgcggcgcttccagggactgctgctggaccgccgaggccggctgcacggccaggtgctgcgcctgcgcgaggtggcccggcgcctggagcgcctgcgcaggcgctccctcgtagccaacgtggccggcagctcgctgagcgcaacgggcgccctcgccgccatcgtggggctctcgctcagcccggtcaccctggggacctcgctgctggtgtcggccgtggggctgggggtggccacagccggaggggccgtcaccatcacgtccgatctctcgctgatcttctgcaactcccgggagctgcggagggtgcaggagatcgcggccacctgccaggaccagatgcgagagatcctgagctgcctcgagtttttctgccgctggcagggctgcggggaccgccagctgctgcagtgcgggaggaacgcctccatcgccctgtacaattctgtctacttcatcgtcttctttggctcacgtggcttcctcatccccaggcgggcggagggggacaccaaggttagccaggccgtgctgaaggccaagattcagaaactggccgagagcctggagtcctgcaccggggctctggacgaactcagcgagcagctggagtctcgggttcagctctgcaccaagtccagtcgtggccacgacctcaagatctctgctgaccagcgtgcagggctgtttttctgagaacatcctttccccctaatgaccgaggccagcaaatcatcctcatgggatgctccagaatttgtagctcccttaggaaaacaccaagctgggttaggagccgaaggcaaaggatgagaaaaactgtttttgaagtgggcaggtccccaaagcccttcttttcccatcactgtgacatctgcctgggcttgagtgctacggacttttcagtcttcctagtggaaaaatgtgacccaaaaactctttttcctttatcaaaaactttctgtctaaacacagctgggcaggcactcctgttttaaagttatttcggggtccctgaccctgccctggtggcttggcctgagactggagagagtgccatcctctgggtcctctccaagtcctactagtctttgaagtcctcaaaatgtgcgtgaggaaggcgtttgcctctattccagaatttctgatacaaagaactccagaatccagagcaaatcagcccttctctgaacgttgtaggatggttcagaacccagagaggaccctggtgctgatatctcctcctcttccctttcccctcagcttacttactcccagatgcggcctgggtatgaagtaggcctttcctgagtggctcccaatccagtcctccaagtactcagaggggaagcccgtgaagccgtcatctaagtcctgctccctcacatgaagctgagggccagatagatggagcgactgccaacttcatttcccgacatcattgtgttcagaagagagtgatgggttttgagttagacagtcctgggcttgagacaggctttgtcactactgtgtgagtgtagccacctaatctctctgagactgtgtaaaacaaagatgataaaatctcaccctgttgtgagatattaaatgagccaaagtgcctagcatgatggtgctggctcatatagtgtagtccctggaatggcaaattaacatcacccaggaacttgttagaaaggcaaattcttggacacaaccctcctgatttatggaatcagaaactctggctgtggggcccagcaacctgagtttaaacaatttctctgggtggttctgcggcacactaaggtttgaaaatcactgcaacaaatgctaacttctaatccccttgatgagctttcacgaagtctcacggcttctctagggactccatggtcttcagagtcgttcacagatgaccaaggacagactgtgtcccagaagccaaaatgagagagagagagagagagcacgcgtacgtgcaccctggggcagtgtctcaccgtatgaacaagggatgtaacactaaaagcccattagggggcagtgtttcccgcctgttgtagaaactggtacagaaaggaatatgaagttcctgaaactgacctttgtctattattaccttctctgaaaagtgccagtccatgtattttttatttattttaagtttgtaatttaatttttaattattgtttagtgtttgcatttaattttatttaatcaccacatttagaaaataataagagcaagtttctaaatgggagactgctgaggctctttgcaagagatgagattaagtttgagtttctaaggcagggcatgagctggaaatagcattgctttccttgattgtctctctccttcagggagattctttttctctagtgttttaagtgatcctttgaagtaagtgtggagagtcttgaatggcaagaccaggagctgagtttaagcttgtaatggaagcttgcattgtgggatatataactgaggaagcatatttatcctgaaggtattttgccagaaggtatcacttgacctggaaaaggaatctatttagttcaggaaagataaaaagtttagaggtatgtgaaggaagcacttagaacttgcaagcctgatgtcctatcaagttatgtcttctgggtgacagacaaaatcgcttgtcttatggtggtgatgtgttgcattttcactttggggtctgtaagaaactgtcagtgaaaatatgtacaattccttcaatttccattcttaacaactgtaatgttgaaaaataagttgaaaagtctttgggaccatacatgcaaaaacggtgcctctgttacttaattatttaatattctataaatgtacccaatctgtccgcacccttcccagtgatggggcagtatgtctgaggaagtataatttcagtactggggtcggggagaggaggtgatgtttctacatttttattttttctataaattgcaattggtctgtatgctggtttattttgaaatttatattggtttcttttcaagctggtgtcatctcctagactgtttcacccagatgctagcattttttttttttttttgagacagagtctcactctgtcacctaggctggagttgcagtggtttgatctcggctcactgcaacctccgactcctgggttcaagcaattcttctgcctcagcctcctgagtagctgggattacagatgtgcaccagcacacccggctaattttttgtatttttagtagagacagggtttcgccatgttggccaggctggtcttgaactcctggccttatgtgatccgcccaccttggcttcccaaagtgctgggattacaggcatgagccacctcgcctggccagatgctagcattttagatcaaacaattcattttagatgaattgttttgtttcacaatcattttaaatcattttagaatgtacttcacattattagttgtgttatggcataaaggtacaaccattccctaactccatcttttattaatgcttaagtttaaattatattcttccaatgcctaagctattccctagaattaaactgggcacttttggaagcagcaacagtaacagcagcagcaaacttttcctctcatattttgggtgtatcaaaagttctagacttttgaagttatgatttcagtggcccactttatttctaaggaagagtgtctactttggaacgatactttgcacatagtaggaactcaagaaatacatttgaataattataattaactgtttagctatcttaatgagaatttgttgacaacaaaagatcatccatcgccttatgtgtgagtaagattggagcctctatcaagatttagtcaagttcagttagattgattctagaaacaaatatttatttctttcttttacggggatgtgaataaggcttttccttaaggccttcattctttaaacaaacaggttgaaatggtatgttgtaaaagagaagacgggagagaggtatttagatgataagtgtacttcacaaaaatgccaaagtttgaaaaataggtatgtttgttctaaatgtttaagtgcttctctgttaggttctggggcttgcaatcatttgaattgttctgtttcacaataaaggagattcactgggttctgcattttcaggattcaatagaactgctccattaaaaaaataatccttagcaagcattcgaatcctaactgctttgatgcacttgccctcgggcacctgtcatttccaatatggtaggtgtcaaagtcaaaagtatttactgggagaaaaaagagaggagtggttgtagaagtctccctaaatcagacatgtcaagcaatcagccaacgtggtgtatttctcattcaatattttagtgtgaattgagacactgagataaagacatcgtgcagagataaatggggatacagttaaatgtagcaactcttgagttcattttttcccactgtagcaaaattaatgctttctctttattgaaataaattgctcattcctcaaaaaaaaaaaaaaaaa

SEQ ID NO: 610 - protein, 279 aa, Homo sapiens
MFRAPCHRLRARGTRKARAGAWRGCTFPCLGKGMERPAAREPHGPDALRRFQGLLLDRRGRLHGQVLRLREVARRLERLRRRSLVANVAGSSLSATGALAAIVGLSLSPVTLGTSLLVSAVGLGVATAGGAVTITSDLSLIFCNSRELRRVQEIAATCQDQMREILSCLEFFCRWQGCGDRQLLQCGRNASIALYNSVYFIVFFGSRGFLIPRRAEGDTKVSQAVLKAKIQKLAESLESCTGALDELSEQLESRVQLCTKSSRGHDLKISADQRAGLFF

SEQ ID NO: 611 - DNA, 585 bp, Homo sapiens
  CDS (1)..(585)
atgctctcctccacactcagggtggctgtggtgtgcgtgagcaatgtcaacaggagcatggaggcccacagcatcctcaggagaaaagggctaagtgtccggtcttttggaactgaatctcatgtgaggctaccaggaccaagacccaatcgtcctgtagtttacgattttgcaacaacatataaggagatgtacaatgacctcctcaggaaagatagagaacgctacacccgcaacggaatcctacacatcttgggaagaaatgagagaatcaagcccggtccagaaagatttcaggagtgcactgatttctttgatgtcatcttcacctgtgaggagagtgtctatgacacagtggtggaagatctgtgttccagagaacagcagacctttcagcctgtgcacgtgatcaacatggaaatccaagataccctggaagatgccaccctgggagctttcctcatctgtgagatttgccagtgcctgcagcagtcagacgacatggaagacaatctggaagagctgctgttgcaaatggaggagaaggcaggaaaaagctttcttcacaccgtctgcttctactga

SEQ ID NO: 612 - protein, 194 aa, Homo sapiens
MLSSTLRVAVVCVSNVNRSMEAHSILRRKGLSVRSFGTESHVRLPGPRPNRPVVYDFATTYKEMYNDLLRKDRERYTRNGILHILGRNERIKPGPERFQECTDFFDVIFTCEESVYDTVVEDLCSREQQTFQPVHVINMEIQDTLEDATLGAFLICEICQCLQQSDDMEDNLEELLLQMEEKAGKSFLHTVCFY

SEQ ID NO: 613 - DNA, 5425 bp, Homo sapiens
  CDS (457)..(2376)
ctctgtctgggtccccaccttagtctacggtgtcgccttttctaactgcgagtgctaaggaagaggcgaggggcgggctccgaggctaggcgggcgctcggggttggagccgagggtctgggcaaaccggtgggtccctccccactgcgggagcggccagggtgggaaaaccgcggtcgggcgggcggggtagggccctcccgccgccgtggctcctggggaggccaggggtgaggagctgtcgccgcctttgcctctgcctcgagggccgcgctgaagagactggtaggagagcgccgcgggcggatggaggcgactcttcgccccgcctgagctcaggaggggctagcgcggagcgcgggtcccgcctccagccgcgggagcggccgcgcgagccaccactggaggaggaggaggaggagcggacgtcggcttctccccgcgggagcccccagcatggttgactatattgtggagtatgactatgatgctgtacatgatgatgaattaactattcgagttggagaaatcatcaggaatgtgaaaaagctacaggaggaagggtggctggaaggagaactaaatgggagaagaggaatgttccctgacaatttcgttaaggaaattaaaagagagacggaattcaaggatgacagtttgcccatcaaacgggaaaggcatgggaatgtagcaagtcttgtacaacgaataagcacctatggacttccagctggaggaattcagccacatccacaaaccaaaaacattaagaagaagaccaagaagcgtcagtgtaaagttctttttgagtacattccacaaaatgaggatgaactggagctgaaagtgggagatattattgatattaatgaagaggtagaagaaggctggtggagtggaaccctgaataacaagttgggactgtttccctcaaattttgtgaaagaattagaggtaacagatgatggtgaaactcatgaagcccaggacgattcagaaactgttttggctgggcctacttcacctataccttctctgggaaatgtgagtgaaactgcatctggatcagttacacagccaaagaaaattcgaggaattggatttggagacatttttaaagaaggctctgtgaaacttcggacaagaacatccagtagtgaaacagaagagaaaaaaccagaaaagcccttaatcctacagtcactgggacccaaaactcagagtgtggagataacaaaaacagataccgaaggtaaaattaaagctaaagaatattgtagaacattatttgcctatgaaggtactaatgaagatgaacttacttttaaagagggggagataatccatttgataagtaaggagactggagaagctggctggtggaggggcgaacttaatggtaaagaaggagtatttccagacaattttgctgtccagataaatgaacttgataaagactttccaaaaccaaagaaaccaccacctcctgctaaggctccagctccaaagcctgaactgatagctgcagagaagaaatatttttctttaaagcctgaagaaaaggatgaaaaatcaacactggaacagaaaccttctaaaccagcagctccacaagtcccacccaagaaacctactccacctaccaaagccagtaatttactgagatcttctggaacagtgtacccaaagcgacctgaaaaaccagttcctccaccacctcctatagccaagattaatggggaagtttctagcatttcatcaaaatttgaaactgagccagtatcaaaactaaagctagattctgaacagctgccccttagaccaaaatcagtagactttgattcacttacagtaaggacctccaaagaaacagatgttgtaaattttgatgacatagcttcctcagaaaacttgcttcatctcactgcaaatagaccaaagatgcctggaagaaggttgccgggccgtttcaatggtggacattctccaactcacagccccgaaaaaatcttgaagttaccaaaagaagaagacagtgccaacctgaagccatctgaattaaaaaaagatacatgctactctccaaagccatctgtgtacctttcaacaccttccagtgcttctaaagcaaatacaactgctttcctgactccattagaaatcaaagctaaagtggaaacagatgatgtgaaaaaaaattccctggatgaacttagagcccagattattgaattgttgtgcattgtagaagcactgaaaaaggatcacgggaaagaactggaaaaactgcgaaaagatttggaagaagagaagacaatgagaagtaatctagagatggaaatagagaagctgaaaaaagctgtcctgtcttcttgagtggtgtggacctggtgttcataatgttccagggattcagaagcaacgctatgaacttcagctgacttgttacttaaaaattgtgaattctgttgttgtgataaatatgagcaaatgaagtgtaatatctatagaaaagtagagtgagggtgaatttatatatatattttgttttgccaatatgaagaaaaagaggccttatttcttaactgtgctgggattgcaaacactttttaaaaaattgtttgcttgaaaatactactgaatataaataagaatgtgcacagtagtttttttattgaaacttgtattatttttaaagagatctatactataaatatggtgatatatttacaagtaatctgttaagatatactatttgagagggacagattagccttttagtaactatagtcactactttttccataatgcataagggatataaactctgtgtgtgtgtgtgtgtgtgtgtgtgtgtgtgtgtgtgtgtgtatatatatatatatatttttacttttatcctcttaccgaaggttacactgttgtgcctgtttgtctgcaatgctgtttatattttgggtgatgaaataggagtttcctagctatataaaccagattactcacccatgcatatagtaagaactaatgaataatcaaaataatttcatcaacttttagaatattttatgttgcttgcactataggagtcataaaaggaacttagttaaaatatgttggattgttaaacatttggggaaatatgaactgtattttaaatttgttaggtctgaagaatctaaaactgttaatttaacccttaacttgtgcctagaaactacagcacatataaaatatgtaaacaccagcctgttgctgtacttttctgcttattttacagcctcaaatatttctcattatcttgtcacttagttcttcatgtttctccttctgacttttaataatggtaataggaaaacaaaacccaaagcttttcagaacttcagtgtgaggtttcctattttgacaagttaacttgtaaatactcaggttttacgatgtataatttacctaatagaccaaactaactcatggagatattttgaactattatttaggtacaaactttataaagaatgttagtatgtcataaaatataacattacagcttatttaaaaccaaatatagttgaacatatttaaaatacattttcacagaatggatgaattagttgtttcttcagagttacttatgaacagttgaatgctttaaaatgttctgtctgtaggtaacatctaaaacacaagtgggtttatttaaatttttaaaatttgaaattttttatttgcaaaaaattgttttatgctttattatatcgcaaatgagtgtcagatttttgagtaccaatgatcatgcttccattttttttagttttaaaccaccaaaccaatatttttcctttaaattttaatcttataatatagaaatcttatgtaaatgaaattttgtcatgtttcaaataaagagaactgaagtagaaaatagaaatgccagtaaacaacataatgtttaatttacaacttacattaggggtttgggggaatgctaattatatattgagaatatacattagaactcttcaaaatgggctcttctaatgaggtcactactgaacaaaattgttccctcttctgttaaatagaataggtttaaatgactagtcaaatgaattattttcttcttgttaaataaattaaatcttactttcttttaatgaccaaccttaggtaaaacaaaaatattgtaatcctagaaattatcctccagctttctcacctgaaaatctattgaagtgatccctggtcatcctaataatgggatgagggaagtttccagcagatttcaggctgttcttaaagtttttgttggtcattttctcaatagtacatgaaatcaagatgcttatgagcatggaaatgtatttaaagtttttgcttgtgtcctcctcagtcagaatagaaaagtaactgaaatacttttacctttctgtccttgataaaatagtaaagaaaaccaaacaaacccaggcctgatgggaaaaatgattcctttattctagcaacttactttctgttggtatgggaaatgttattaatttctattactaaagttcatatcacaaaatgatatttaataataaccttggggtaaatcatgaattttttttctacgtgtgagtataaaagacaaaagttgaacagcatggaatctcattgccaaattattagtgaatgtatagttcaggtattctttgagacacacagtatcattaatttctgaattgtatttcagtgttattttttgtttgtgaccactaagcttctgtcttaatacaaagctgttaccttctacagaatttaagtctgaagatgtaaagagagaacaggccttgtgtaacagaagatactcttttttatgctccttactgtgatcacagaaaaattaaaaatccaagtgctctctagatttgttgataaacattttatgcttgcatttaaacttgaaatgtatgagcagaatgagacaatcagttaaatcagaaatgagaagtattataatgtaaaggccttgttttgctgtagcaataaaatgaccaagtgcaatgacttgatttaataaaatcatattttaaaagttgctgctatgaatatttttggctataaaattttaccctgacttgctttcaataactgttacgtaatgcagttgatgttgtaacctaacattccaaaaaaaaaattgagagggggaatctcaaaatagtatatacttcactaacttgtttacaggtgctgtatttaaaagcatgcttctctctcaaaaagaaaaattaaaggattttattgccagtcgtgtcagtctttattggttattttttgttaactttagcatttgtgtatttcagagtatgatgaaaattatattacttcaatttccaaatacaagaataaatagtaaaccaaaaacattaaaaaaaaaaaaaaaaaa

SEQ ID NO: 614 - protein, 639 aa, Homo sapiens
MVDYIVEYDYDAVHDDELTIRVGEIIRNVKKLQEEGWLEGELNGRRGMFPDNFVKEIKRETEFKDDSLPIKRERHGNVASLVQRISTYGLPAGGIQPHPQTKNIKKKTKKRQCKVLFEYIPQNEDELELKVGDIIDINEEVEEGWWSGTLNNKLGLFPSNFVKELEVTDDGETHEAQDDSETVLAGPTSPIPSLGNVSETASGSVTQPKKIRGIGFGDIFKEGSVKLRTRTSSSETEEKKPEKPLILQSLGPKTQSVEITKTDTEGKIKAKEYCRTLFAYEGTNEDELTFKEGEIIHLISKETGEAGWWRGELNGKEGVFPDNFAVQINELDKDFPKPKKPPPPAKAPAPKPELIAAEKKYFSLKPEEKDEKSTLEQKPSKPAAPQVPPKKPTPPTKASNLLRSSGTVYPKRPEKPVPPPPPIAKINGEVSSISSKFETEPVSKLKLDSEQLPLRPKSVDFDSLTVRTSKETDVVNFDDIASSENLLHLTANRPKMPGRRLPGRFNGGHSPTHSPEKILKLPKEEDSANLKPSELKKDTCYSPKPSVYLSTPSSASKANTTAFLTPLEIKAKVETDDVKKNSLDELRAQIIELLCIVEALKKDHGKELEKLRKDLEEEKTMRSNLEMEIEKLKKAVLSS

SEQ ID NO: 615 - DNA, 4814 bp, Homo sapiens
  CDS (190)..(849)
ctgttaaggtatacagacagtagttaaatagcagggccaactattctgttaagggtcttcctagacagactaaaaaagccatgtattctttcgtttctctctaaaagaagaaaaatataatttaaaaatacattgcgtattttctaaaacaataaatttatagtgttaatattcatagggtcaatcaaaatgaagcttctcctttgggcctgcattgtatgtgttgcttttgcaaggaagagacggttccccttcattggtgaggatgacaatgacgatggtcacccacttcatccatctctgaatattccttatggcatacggaatttaccacctcctctttattatcgcccagtgaatacagtccccagttaccctgggaatacttacactgacacagggttaccttcgtatccctggattctaacttctcctggattcccctatgtctatcacatccgtggttttcccttagctactcagttgaatgttcctcctctccctcctaggggtttcccgtttgtccctccttcaaggtttttttcagcagctgcagcacccgctgccccacctattgcagctgagcctgctgcagctgcacctcttacagccacacctgtagcagctgagcctgctgcaggggcccctgttgcagctgagcctgctgcagaggcacctgttggagctgagcctgctgcagaggcacctgttgcagctgagcctgctgcagaggcacctgttggagtggagccagctgcagaggaaccttcaccagctgagcctgctacagccaagcctgctgccccagaacctcacccttctccctctcttgaacaggcaaatcagtgaaattctctagaagagtaccatgggttcatttctatactgatgcagaaataagtgaaatctacaaaagttttctttcttttccaaagactatttcattctgttgtattcagagtattcatctcactacattgatttgtttgtggtagtttttccttggacttaatttatattgaaaaaacattgataattaaataaataaaatagataatttagaccaatggtgataaggtctggatgaaaactacgctatggaggactgaaatggcaatcattcagcctagcctggagtctgattatacagctactataggatgatgttagtattggttttgagtgcaataggttttttcctaaacaaacatattttgtagtcaatgaactttttgtcacaaaacagtaaaacatctgtgtttaacctatggtaaacaacatgttaatgaactatgctatccatgacttaatggacagttcaaatgtgacatctacagtttttcatttctcttttatgccagcacacaatcaattcatcaccaattgtcatttgatttacttcaaaaaatatacccccaaatcctaatacttctaaccttctccactgcatctagccaactctagctattgtcatccctaacagaaatggaggaatagcctctttttttttttttttttttgagacgaagtctcacactgttgcacggctgtagtgcaatggtgccaactcagctcactgcaacttccacctcccgggttcaagtgattctcctgcctcagcctcctgagtagccgggattacaggtgtgtgccaccacgcctggctaattttttgtaatttagtacagacaggggttccctatgttggccaggatggtcttgatctcctgacctcatgatctgtccgcctcggcctcccaaagtgctgggaatacaggcgtgagccaccgtgccctgccagaatagcctattaaccagtctacctgcttccacttttcctccaccctgatcacatacacacatgcattatccactgagcagtcacaatcagatgttaaaccaaacattattcagataagatctctgaaaagcctctgatactttctcttttaaaatggaatatattctaaacacctctccaaggacacaagacttaccttgtctaactaatgacttttctaacttcattccctatcattctccatcttgccccatgctcctcatgcagcagcttttttttttttttcctttttcaaatatgttggttttgatcttatccaagaacctttgccctgatgtatgaatgactaactgcttttctacttcgggggtctcatatagaaatcctgcttcagaatactcttccctgagcactctatctaaataaatccctcttctgcaacccagtgctttttgttctattactgacttcttttccttgtagaagttactattactgctttttacctttttatttatttgtgtattgtctttgttgttgccctcatcttatctccacaaaaatatatgctccataaaaacaggcatttctgtgtcttattcagcactttatcagggcctataacaatgcctgggacatattcagtgaccagtgaatatttttggaaggaaagaaaagaagaaagaatgaagtaacaaacaaagaatgaaggaagaaaaaatttttacaaacattcaacatatttttattttgaaataattttgtatttttccctatatcctacattggatcagaatattactgttatgtatagccatgaggacatggtctcaaaaaatgagaaactttcttagacagtaaaattgttaacttgagatgtttgcttccatcttctagagccaagtaggatctaactttaatttgacttagccaataatctgaaactattatagtatctgtctttcacagatacatgcaatattcacttctaaatatttaatgataaatttgtaatcatacatgatagtcaattttaatgattatgttgtcaaaattcaggctttttgtgtgaattgaagacttaaagaagaatttgtaaatatgactgtataagaaacaacagaaagatgaagatgaaccgaaatagaaatatcaagaggctacaaagtcttagcaaattataattgctaatggtacattatgtggtgtttagtatcacatttagaatgtagtcatttgttaagtttttcatggggtaaaagaaagaatttattccaagaaaattttggaattttaaaaataaacatgacatcttatcatgagaaacatttacagtttttgcttttactacaagatactgtgaaatgttctgctctgtcagttgtgaaagtatgaaatttaagtctatcactacaataatattttgtttttagtgttcatttttttcctcctgactacattgagatgagttagattgagtgaaaggtaaacactaacatttgaattgaggtaatttccactgtggaaaacaaactgttgttagtaaacaggcatcagctttgagacacagaaaagtcatccaaaccagaagattgggaacttcctcaattactttgtcttccatttattgcattcaattagtcaaaaatgttgttaattatacattttaaagactatttttggtaaggtctatgacacattcaaaatactacatacaagtttgtattatcataaataatccaaaagaaaacatacatgtaaccaccaccatctggaaatttcacactaaattataaaacatttccatcactgcatgtattgtttaatgtcgctttatgaatccaccttcttccttatctgtagagttaaaaactacttagtggattagggtaattcattctacttttaaaaatgatttttccacctctaatgtattctataaaataatattgttcacttttgcctatttttgagctttttatagaaaaatgctactgcgaaattattttgagtcatatcttttgatcgatattaagatacatttgcagagttttgtatgtgtgtttatatccatcttacataattctttactgtatagcgttccctttagccactggaaaatgatataatgtcattgcttacagaaggtgactgattcttattcagtgctactttctacagacaggtaactattcgcatttacgattaagaaatgttcacaccttcacactggtatcaactgcaacaaccactatacttctccagtgattgccagatggcccactatacatcctttcttctatttctttcttttgtggccagaaagtcaggacctcaaagaggtataagtttgtgtgtataattccctggcttttttctaaaattttagtatgcatttatgtggcacttaatatataaaagagttttatgagttttaaaaatgtatataaacaagacatataataaatggtatgtcatttcacaatttactatttttactcaacatttatatttctgagacttttcacatttttgaatgtattcatagtttcactttaattgatgtttgccatgaaagatcaaatatatcacattttatttgactaaaaagtaaactatatttcctacattatgctatagaacttatagactaatttaagttaattataggccttatctcagacctttgcaagtagcctgaataaaacttttcattatttatattatcacatgcatatatgtgtgtatgtatatatgtgtgcatgtgcatgcatagtaaaaatcttaacccaaaactgaaataaaaaattataagagaaaatactattttccaccaatatcacaatggataatcttttttaaatgactacatatgtcgataagttacaaaatccatatatgagtatgacaccaataagaacattttctctaaccattttgaatacgaataaccatggattctaatagcaaacattattaaaatattattgaaataaaaaaaaaaaaaaaaaaa

SEQ ID NO: 616 - protein, 219 aa, Homo sapiens
MKLLLWACIVCVAFARKRRFPFIGEDDNDDGHPLHPSLNIPYGIRNLPPPLYYRPVNTVPSYPGNTYTDTGLPSYPWILTSPGFPYVYHIRGFPLATQLNVPPLPPRGFPFVPPSRFFSAAAAPAAPPIAAEPAAAAPLTATPVAAEPAAGAPVAAEPAAEAPVGAEPAAEAPVAAEPAAEAPVGVEPAAEEPSPAEPATAKPAAPEPHPSPSLEQANQ

SEQ ID NO: 617 - DNA, 2421 bp, Homo sapiens
  CDS (1)..(2421)
agcggcccccgagtcagccccgcgccaggagccggagagacgcgccctccgcctcctcccacccaagcctcgcgcagtcccgggggcggggcggggccagctgagggaggaaggggcggggacccggggcctctacccgttaggctgccgttggtcccgagactcccccatctgcgcccccgccctgccctgcgaggccgccgccgcgcgccccaccgtctgttgcagtggagcgtgagccgcggctgcggctcctggttcttgtggaaggacagcaaggctgaggagaatggctcccacagcttcatgcactccatggacccacagctggagcggcaaatggaaaccacccagaacctggtggactcctacatggccattgtcaacaagaccgtgtggaacctcatggttggtgcgaagcccaagaccatcatgcacatcatgatctacaatgtgcatgcaccgcctcatggggaccaaggagttcatcttctcagagctgctgtccaacctgtactcgcgtgggaacaaggagacactcctggaggagtcggcagagcaggcacagcggcgcgacgagatgctgcttctcagagctgctgtccaacctgcactcgcgtgggaacgagaagacactcgtggaggcgtcggcagagcaggcaccaaactgcacttgcgtgggaacgagaagacactcatggaggagtcggcagagcaggcacagcggtgcgacgagactcgcgtgggaacgagaagacactcgtggaggcgtcggcagagcaggcagaccaaggagttcatcttctcagagctgctgtccaacctgcactcgcgtgggaacgagaagacactcgtggaggcgtcggcagagcaggcagaccaaggagttcatcttctcagagcttctgtccaacctgtactcgcgtgggaacgagaagacactcgtggaggcgtcggcagagcaggcagaccaaggagttcatcttctcagagctgctgtccaacctgtactcgcgtgggaacgagaagacactcgtggaggcacactcgtggaggcgtcggcagagcaggcagaccaaggagttcatcttctcagagctgctgtccaacctgcactcgcgtgggaacgagaagacactcatggaggagtcggccgagcaggcacagcggcgtgacgagactcgcgtgggaagaagaagacactcctggaggagtcggcagagcaggcagaccaaggagttcatcttctcggagctgctgtccaacctgtactcgcgtcggaacctgcagacacttgtggaggagtcggcagagcaggcacagcggtgcgacgagatgctgcttctcagagctgctgtccaacctgcactggcgtgggaacgagaagacactcgtggaggcgtcggcagagcaggcagaccaaggagttcatcttctcagagctgctgtccaacctgcactcgcgtgggaacgagaagacactcatggaggagtcggccgagcaggcacagcggcgtgacgagactcgcgtgggaagaagaagacactcctggaggagtcggcagagcaggcagaccaaggagttcatcttctcggagctgctgtccaacctgtactcgcgtcggaacctgcagacacttgtggaggagtcggcagagcaggcacagcggtgcgacaagatgctgcttctcagagctgctgtccaacctgcactggcgtgggaacgagaagacactcgtggaggcgtcggcagagcaggcagaccaaggagttcatcttctcagagctgccgtccaacctgtcctcgcgtgggaacgagaagacactcgtggaggcgtcggcagagcaggcagaccaaggagttcatcttctcagagctgctgtccaacctgcactcgcgtgggaacgagaagacactcgtggaggcgtcggcagagcaggcagaccaaggagttcatcttctcagagctgctgtccaaactgcactcgcgtgggaacgagaagacactcatggaggagtcggcagagcaggcacagcggtgtgacgagactcgcgtgggaagaagaagacactcctggaggagtcggcagagcaggcagaccaaggagttcatcttctcggagctgctgtccaacctgtactcgcgtcggaacctgcagacacttgtggaggagtcggcagagcaggcacagcgaagacactcgtggaggcgtcggcagagcaggcagaccaaggagttcatcttctcagagctgctgtccaacctgtactcgcgtgggaacgagaagacactcgtggaggcgtcggcagagcaggcagaccaaggagttcatcttctcagacctgctgtccaacctgcactcgcgtgggaacgagaagacactcatggaggagtcggccgagcaggcacagcggcgtga

SEQ ID NO: 618 - protein, 806 aa, Homo sapiens
SGPRVSPAPGAGETRPPPPPTQASRSPGGGAGPAEGGRGGDPGPLPVRLPLVPRLPHLRPRPALRGRRRAPHRLLQWSVSRGCGSWFLWKDSKAEENGSHSFMHSMDPQLERQMETTQNLVDSYMAIVNKTVWNLMVGAKPKTIMHIMIYNVHAPPHGDQGVHLLRAAVQPVLAWEQGDTPGGVGRAGTAARRDAASQSCCPTCTRVGTRRHSWRRRQSRHQTALAWEREDTHGGVGRAGTAVRRDSRGNEKTLVEASAEQADQGVHLLRAAVQPALAWEREDTRGGVGRAGRPRSSSSQSFCPTCTRVGTRRHSWRRRQSRQTKEFIFSELLSNLYSRGNEKTLVEAHSWRRRQSRQTKEFIFSELLSNLHSRGNEKTLMEESAEQAQRRDETRVGRRRHSWRSRQSRQTKEFIFSELLSNLYSRRNLQTLVEESAEQAQRCDEMLLLRAAVQPALAWEREDTRGGVGRAGRPRSSSSQSCCPTCTRVGTRRHSWRSRPSRHSGVTRLAWEEEDTPGGVGRAGRPRSSSSRSCCPTCTRVGTCRHLWRSRQSRHSGATRCCFSELLSNLHWRGNEKTLVEASAEQADQGVHLLRAAVQPVLAWEREDTRGGVGRAGRPRSSSSQSCCPTCTRVGTRRHSWRRRQSRQTKEFIFSELLSKLHSRGNEKTLMEESAEQAQRCDETRVGRRRHSWRSRQSRQTKEFIFSELLSNLYSRRNLQTLVEESAEQAQRRHSWRRRQSRQTKEFIFSELLSNLYSRGNEKTLVEASAEQADQGVHLLRPAVQPALAWEREDTHGGVGRAGTAA

SEQ ID NO: 619 - DNA, 1484 bp, Homo sapiens
  CDS (230)..(1426)
cccgtgaggaggaaaaggtgtgtccgctgccacccagtgtgagcgggtgacaccacccggttaggaaatcccagctcccaagagggtataaatccctgctttactgctgagctcctgctggaggtgaaagtctggcctggcagccttccccaggtgagcagcaacaaggccacgtgctgctgggtctcagtcctccacttcccgtgtcctctggaagttgtcaggagcaatgttgcgcttgtacgtgttggtaatgggagtttctgccttcacccttcagcctgcggcacacacaggggctgccagaagctgccggtttcgtgggaggcattacaagcgggagttcaggctggaaggggagcctgtagccctgaggtgcccccaggtgccctactggttgtgggcctctgtcagcccccgcatcaacctgacatggcataaaaatgactctgctaggacggtcccaggagaagaagagacacggatgtgggcccaggacggtgctctgtggcttctgccagccttgcaggaggactctggcacctacgtctgcactactagaaatgcttcttactgtgacaaaatgtccattgagctcagagtttttgagaatacagatgctttcctgccgttcatctcatacccgcaaattttaaccttgtcaacctctggggtattagtatgccctgacctgagtgaattcacccgtgacaaaactgacgtgaagattcaatggtacaaggattctcttcttttggataaagacaatgagaaatttctaagtgtgagggggaccactcacttactcgtacacgatgtggccctggaagatgctggctattaccgctgtgtcctgacatttgcccatgaaggccagcaatacaacatcactaggagtattgagctacgcatcaagaaaaaaaaagaagagaccattcctgtgatcatttcccccctcaagaccatatcagcttctctggggtcaagactgacaatcccgtgtaaggtgtttctgggaaccggcacacccttaaccaccatgctgtggtggacggccaatgacacccacatagagagcgcctacccgggaggccgcgtgaccgaggggccacgccaggaatattcagaaaataatgagaactacattgaagtgccattgatttttgatcctgtcacaagagaggatttgcacatggattttaaatgtgttgtccataataccctgagttttcagacactacgcaccacagtcaaggaagcctcctccacgttctcctggggcattgtgctggccccactttcactggccttcttggttttggggggaatatggatgcacagacggtgcaaacacagaactggaaaagcagatggtctgactgtgctatggcctcatcatcaagactttcaatcctatcccaagtgaaataaatggaatgaaataattcaaacacaaaaaaaaaaaaaaaaaaaaaaaaaaaaaa

SEQ ID NO: 620 - protein, 398 aa, Homo sapiens
MLRLYVLVMGVSAFTLQPAAHTGAARSCRFRGRHYKREFRLEGEPVALRCPQVPYWLWASVSPRINLTWHKNDSARTVPGEEETRMWAQDGALWLLPALQEDSGTYVCTTRNASYCDKMSIELRVFENTDAFLPFISYPQILTLSTSGVLVCPDLSEFTRDKTDVKIQWYKDSLLLDKDNEKFLSVRGTTHLLVHDVALEDAGYYRCVLTFAHEGQQYNITRSIELRIKKKKEETIPVIISPLKTISASLGSRLTIPCKVFLGTGTPLTTMLWWTANDTHIESAYPGGRVTEGPRQEYSENNENYIEVPLIFDPVTREDLHMDFKCVVHNTLSFQTLRTTVKEASSTFSWGIVLAPLSLAFLVLGGIWMHRRCKHRTGKADGLTVLWPHHQDFQSYPK

SEQ ID NO: 621 - DNA, 3637 bp, Homo sapiens
  CDS (58)..(1314)
cgggagtagcgcagtcgccaaagccgccgctgccaaagctgccgccactagccgggcatggccatggcgtccccggccatcgggcagcgcccgtacccgctactattggaccccgagccgccgcgctatctacagagcctgagcggccccgagctaccgccgccgccccccgaccggtcctcgcgcctctgtgtcccggcgcccctctccactgcgcccggggcgcgcgaggggcgcagcgcccggagggctgcccgggggaacctggagcccccgccccgggcctcccgacccgctcgcccgctccggcctggtctgcagcagagactgcggcggcggcctggagcgccccgaccccgcgacgtgcggagcatcttcgagcagccgcaggatcccagagtcccggcggagcgaggcgaggggcactgcttcgccgagttggtgctgccgggcggccccggctggtgtgacctgtgcggacgagaggtgctgcggcaggcgctgcgctgcactaactgtaaattcacctgtcacccagaatgccgcagcctgatccagttggactgcagtcagcaggagggtttatcccgggacagaccctctccagaaagcaccctcaccgtgaccttcagccagaatgtctgtaaacctgtggaggagacacagcgcccgcccacactgcaggagatcaagcagaagatcgacagctacaacacgcgagagaagaactgcctgggcatgaaactgagtgaagacggcacctacacgggtttcatcaaagtgcatctgaaactccggcggcctgtgacggtgcctgctgggatccggccccagtccatctatgatgccatcaaggaggtgaacctggcggctaccacggacaagcggacatccttctacctgcccctagatgccatcaagcagctgcacatcagcagcaccaccaccgtcagtgaggtcatccaggggctgctcaagaagttcatggttgtggacaatccccagaagtttgcactttttaagcggatacacaaggacggacaagtgctcttccagaaactctccattgctgaccgccccctctacctgcgcctgcttgctgggcctgacacggaggtcctcagctttgtgctaaaggagaatgaaactggagaggtagagtgggatgccttctccatccctgaacttcagaacttcctaacaatcctggaaaaagaggagcaggacaaaatccaacaagtgcaaaagaagtatgacaagtttaggcagaaactggaggaggccttaagagaatcccagggcaaacctgggtaaccggtcctgcttcctctcctcctggtgcattcagatttatttgtattattaattattattttgcaacagacactttttctcaggacatctctggcaggtgcatttgtgcctgcccagcagttccagctgtggcaaaagtctcttccatggacaagtgtttgcatgggggttcagctgtgcccgcccccaggctgtgccccaccacagattctgccaaggatcagaactcatgtgaaacaaacagctgacgtcctctctcgatctgcaagcctttcaccaaccaaatagttgcctctctcgtcaccaaactggaacctcacaccagccggcaaaggaaggaagaaaggttttagagctgtgtgttctttctctggctttgattcttctttgagttctcttacttgccacgtacaggaccattatttatgagtgaaaagttgtagcacattccttttgcaggtctgagctaagcccctgaaagcagggtaatgctcataaaaggactgttcccgcggccccaaggtgcctgttgttcacacttaagggaagtttataaagctactggccccagatgctcagggtaaggagcaccaaagctgaggctggctcagagatctccagagaagctgcagcctgccctggccctggctctggccctggcccacattgcacatggaaacccaaaggcatatatctgcgtatgtgtggtacttagtcacatctttgtcaacaaactgttcgtttttaagttacaaatttgaatttaatgttgtcatcatcgtcatgtgtttccccaaagggaagccagtcattgaccatttaaaaagtctcctgctaagtatggaaatcagacagtaagagaaagccaaaaagcaatgcagagaaaggtgtccaagctgtcttcagccttccccagctaaagagcagaggagggcctgggctacttgggttccccatcggcctccagcactgcctccctcctcccactgcgactctgggatctccaggtgctgcccaaggagttgccttgattacagagaggggagcctccaattcggccaacttggagtcctttctgttttgaagcatgggccagacccggcactgcgctcggagagccggtgggcctggcctccccgtcgacctcagtgcctttttgttttcagagagaaataggagtagggcgagtttgcctgaagctctgctgctggcttctcctgccaggaagtgaacaatggcggcggtgtgggagacaaggccaggagagcccgcgttcagtatgggttgagggtcacagacctccctcccatctgggtgcctgagttttgactccaatcagtgataccagaccacattgacagggaggatcaaattcctgacttacatttgcactggcttcttgtttaggctgaatcctaaaataaattagtcaaaaaattccaacaagtagccaggactgcagagacactccagtgcagagggagaaggacttgtaattttcaaagcagggctggttttccaacccagcctctgagaaaccatttctttgctatcctctgccttcccaagtccctcttgggtcggttcaagcccaagcttgttcgtgtagcttcagaagttccctctctgacccaggctgagtccatactgcccctgatcccagaaggaatgctgacccctcgtcgtatgaactgtgcatagtctccagagcttcaaaggcaacacaagctcgcaactctaagatttttttaaaccacaaaaaccctggttagccatctcatgctcagccttatcacttccctccctttagaaactctctccctgctgtatattaaagggagcaggtggagagtcattttccttcgtcctgcatgtctctaacattaatagaaggcatggctcctgctgcaaccgctgtgaatgctgctgagaacctccctctatggggatggctattttatttttgagaaggaaaaaaaaagtcatgtatatatacacataaaggcatatagctatatataaagagataagggtgtttatgaaatgagaaaattattggacaattcagactttactaaagcacagttagacccaaggcctatgctgaggtctaaacctctgaaaaaagtatagtatcgagtacccgttccctcccagaggtgggagtaactgctggtagtgccttctttggttgtgttgctcagtgtgtaagtgtttgtttccaggatattttctttttaaatgtctttcttatatgggttttaaaaaaaagtaataaaagcctgttgcaaaaatgactcatgttaaaaaaaaaaaaaaaaaa

SEQ ID NO: 622 - protein, 418 aa, Homo sapiens
MAMASPAIGQRPYPLLLDPEPPRYLQSLSGPELPPPPPDRSSRLCVPAPLSTAPGAREGRSARRAARGNLEPPPRASRPARPLRPGLQQRLRRRPGAPRPRDVRSIFEQPQDPRVPAERGEGHCFAELVLPGGPGWCDLCGREVLRQALRCTNCKFTCHPECRSLIQLDCSQQEGLSRDRPSPESTLTVTFSQNVCKPVEETQRPPTLQEIKQKIDSYNTREKNCLGMKLSEDGTYTGFIKVHLKLRRPVTVPAGIRPQSIYDAIKEVNLAATTDKRTSFYLPLDAIKQLHISSTTTVSEVIQGLLKKFMVVDNPQKFALFKRIHKDGQVLFQKLSIADRPLYLRLLAGPDTEVLSFVLKENETGEVEWDAFSIPELQNFLTILEKEEQDKIQQVQKKYDKFRQKLEEALRESQGKPG

SEQ ID NO: 623 - DNA, 645 bp, Homo sapiens
  CDS (149)..(499)
gcttggcgcgtctccgtttctcttctgaggggctgagagtcgcggagtttcctagttggaggctgtggcggacgcgatttgcttcctcatatagggttccggaggcggcgaaaagtccagcgggtctccgaagccggtagacggagccatgaagaagacgtcgggcttcaggagggggaagggcgggctgccctggggctcggtcagcagccccgggaaggtgggcgcgggcgccgggagtgagagtgcggaccacgcctcctcccagcccaggcgccacgacccggacaaggggttcgacaggctccgcagagctgccggccgacaccggacagagacgatgcggcggatcctttctctgccgaagagtggcgtggatgacagagacgagaagaacaggctgtccaacgaacagagttctggtgactcatggctttcaatagatgatgaactctttgattctggtaccaagattctcttcagcaatatcatcacttgaagcctaaggttgaaatgaaagagtgtgtttcgaaccaggcagtcggaatgaaagatgtacaagcatgcacatcagctttttcagctttggattttaatagtttgaccttcagtaatgagcttcatgaaagatctgagaatttgaaa

SEQ ID NO: 624 - protein, 116 aa, Homo sapiens
MKKTSGFRRGKGGLPWGSVSSPGKVGAGAGSESADHASSQPRRHDPDKGFDRLRRAAGRHRTETMRRILSLPKSGVDDRDEKNRLSNEQSSGDSWLSIDDELFDSGTKILFSNIIT

SEQ ID NO: 625 - DNA, 723 bp, Homo sapiens
  CDS (149)..(400)
ccggcctctgggcggagatctgctgccgcgttctacccttccggcccgtgttctatccgccgcctccaccttccatccggcgccggctttcggcgcgacggtcgccgcgttccatcgtcgcgcggcccttcgggcgcccgagcccgcaatgtcgggccccaacggagacctggggatgccggtggaggcgggagcggaaggcgaggaggacggcttcggggaagcagaatacgctgccatcaactccatgctggaccagatcaactcctgtctggaccacctggaggagaagaatgaccacctccacgcccgcctccaggagctgctggagtccaaccggcagacacgcctggagttccagcagcagctcggggaggcccccagtgatgccagcccctaggctccaagagcccccaaccgggacccaaccctgcctccctgggctaggctctggcctgggcactcaccccctggcttagacaccttctcaagggctggccttcagggacccctggtgggtctgcctgcctgggccacccttcctgcctgggcctccccttggcctacctgggccagcccccaccacctggcatgccctcctggggccaagagtgggcctgcaacccacccacttgcctgcccacccaactcctgggcgctccccactctgcccaggccttgagtgtccacattaaatgggtctcccacaccgcaaaaaaaaaa

SEQ ID NO: 626 - protein, 83 aa, Homo sapiens
MSGPNGDLGMPVEAGAEGEEDGFGEAEYAAINSMLDQINSCLDHLEEKNDHLHARLQELLESNRQTRLEFQQQLGEAPSDASP

SEQ ID NO: 627 - DNA, 1519 bp, Homo sapiens
  CDS (345)..(629)
acgcgggttaatgaaataaattgtctactatatataggttttgtgtgaacatacaaatgaaatgtactgtctcagaataatgtggttggggaaatatctggagacaaatacaatgcaattgcaacataacagttacacaccagactcttaacaggaataatgtagtgtgatacttgaaagcctaaactctgaaatgagattgcctgagctgagatctcaattcctctaactatgtaaccctgggcgagttacttcaaagtgcctccgttttcttctctgcaaaataaccattgatttgaaatgtggaggattttgaaacctaagctaagaaatgtgggtttgatatgctgaaaaatagggagctacttaaaatttttgaacaagcaagtcacatgatgaaattaattgaggaacattgtatttgtgattgcatatggatggagtgggaggacctagaggcaaagacattagataggagaccaccagaacaaactagacgtgaaaggtgcagctgtggaaatggaaagagatgggcaaaaccaaaaatcaccacagagaaaaaaaatcatccagatttcatgatagattggatgtattttgaaacacctctctccatacaaatgaaataattcagcaaaattctagaaaatgctggtgtaggagctcagtggaaatctcccgtaagtgctgtgagaaattataaattctggggactccagctgatacagtgtgcattcacttacagcttcctttgcccctttgtacactagagcacaacaggaaatattggcttatctctgtaggaagtgtctctataggagttgcttactgaactgaatatctttgtttagaactaattgacctttctaaaacagcatttttaaagagcttactcaaataaggcagactttaaccatctgataagtcagagacaaatcagtcctcttctaagcaaggttgacagtcagtgcaagagaaaagaaagcacagaaagaaaggcaccatcagacaaaagaacagtgtattagtaaaaaccagataattaagaaaattttatttaatgtgaacattgaattctaacacaaatccttttcctgcattatgatagtatctgtgtgaaccaaccttttttcagccctttttgttatggaatgttaagaatgttagtttacaaggttataaagtagaagagtctaattagaaaccagaaaatatctcagtcttttggtctgaatttgttttcctttggttagattcttaaagtagaaaaaaaaaaaactactacttattttgtaaacattttgaggattttgattcagatattttaaattattatgagagataaagaataaccctgtccaaaaaagtaagaaaatgaataaaatttgtttaaaagaggattctcttaaaatataaccaaagggacagattttgacagcagtcttcattgttgttccatatgagtgttttctaaacctaacagatgtaagcaataaataagtaaaaaaaaaaaaaaaaa

SEQ ID NO: 628 - protein, 94 aa, Homo sapiens
MLKNRELLKIFEQASHMMKLIEEHCICDCIWMEWEDLEAKTLDRRPPEQTRRERCSCGNGKRWAKPKITTEKKNHPDFMIDWMYFETPLSIQMK

SEQ ID NO: 629 - DNA, 2323 bp, Homo sapiens
  CDS (36)..(1658)
tcagcatcttatccccactttctggcctccccaccatgagccgccaattcacctacaagtcgggagctgctgccaaggggggcttcagcggctgctccgctgtgctctcagggggcagctcatcctcctaccgagcagggggcaaagggctcagtggaggcttcagcagtcggagcctttacagcctggggggtgcccggagcatctctttcaatgtggccagtggcagtgggtgggcaggaggctatggatttggccggggccgggccagtggctttgctggcagcatgtttggcagtgtggccttggggtccgtgtgtccgtcgttgtgcccgcccgggggtatccatcaggtcaccatcaacaagagcctcctggcacccctgaacgtggagctggaccctgaaatccagaaagtgcgtgcccaggagcgggagcagatcaaggtgctgaacaacaagttcgcctccttcattgacaaggtgcggttcctggagcagcagaaccaggtgctggagaccaagtgggagctgctacagcagctggacctgaacaactgcaagaataacctggagcccatccttgagggctacatcagcaacctgcggaagcagctggagacgctgtctggggacagggtgaggctggactcggagctgaggagcgtgcgcgaagtggtggaggactacaagaagaggtatgaagaagaaataaacaagcgcacaactgctgagaatgaatttgtggtgcttaagaaggacgtggacgcagcttacacgagcaaagtggagctgcaggccaaggtggatgccctggatggagaaatcaagttcttcaagtgtctgtacgagggggagactgctcagatccagtcccacatcagcgacacgtccatcatcctgtccatggacaacaaccggaacctggacctggacagcatcattgctgaggtccgtgcccagtatgaggagatcgcccggaagagcaaggccgaggccgaggccctgtaccagaccaagttccaggagctgcagctagcagccggccggcatggggatgacctgaaacacaccaaaaatgagatctcagagctgacccgtctcatccaaagactgcgctcggagattgagagtgtgaagaagcagtgtgccaacctggagacggccatcgctgacgccgagcagcggggggactgtgccctcaaggatgccagggccaagctggatgagctggagggcgccctgcagcaggccaaggaggagctggcacggatgctgcgcgagtaccaagagcttttgagcgtgaagctgtccctggatattgagatcgccacctaccgcaagctgctggagggcgaggagtgcaggatgtccggagaatataccaactccgtgagcatttcggtcatcaacagctccatggccgggatggcaggcacaggggctggctttggattcagcaatgctggcacctacggctactggcccagctctgtcagcgggggctacagcatgctgcctgggggctgtgtcactggcagtgggaactgtagcccccgtggggaagccaggaccaggctggggagtgcaagtgaattcagggactcccagggaaagaccttagctctaagctcacccaccaaaaaaaccatgagataaaagtgcaacacagcccatttcccagtagtctgccttgccctggcagactgctccggactcttctaggaaattcctctgtctcatttgtcctcatctccttcttgctttgctttgctgtggacctctcctccttctccttgacctctctgcctcagtctttgttaatgttgaatcaggatttgagagctggagcccatctttctgcctccatccaaagaggccttttaactcagcctccccttctggaagaagacttggccttttctctgcctgcatgtccctgtgcagaggaaggctgtctctcaagggtaaccccaatctgcctgtgctgctctttcataccctgtctcagtaactatttggccatgtgctccctgggtacacaagttttcagatctactgatagacctgcaggaactctctcatgttagagcaatactggctcaggcaaaacacctggtgggaagttgtatcttgtatagccactgcatattacatagccaggagtaccccttgaggctaattctaccaaccaagggatttgtgctcttcatctgtgggtacttgtccttgtttaggcctcacctccctgctcctgtgtcttaccaataaacttataaagcccaaaaaaaaaaaaaaaaaaaaaaaaaaaaaaaaaaaaaaaa

SEQ ID NO: 630 - protein, 540 aa, Homo sapiens
MSRQFTYKSGAAAKGGFSGCSAVLSGGSSSSYRAGGKGLSGGFSSRSLYSLGGARSISFNVASGSGWAGGYGFGRGRASGFAGSMFGSVALGSVCPSLCPPGGIHQVTINKSLLAPLNVELDPEIQKVRAQEREQIKVLNNKFASFIDKVRFLEQQNQVLETKWELLQQLDLNNCKNNLEPILEGYISNLRKQLETLSGDRVRLDSELRSVREVVEDYKKRYEEEINKRTTAENEFVVLKKDVDAAYTSKVELQAKVDALDGEIKFFKCLYEGETAQIQSHISDTSIILSMDNNRNLDLDSIIAEVRAQYEEIARKSKAEAEALYQTKFQELQLAAGRHGDDLKHTKNEISELTRLIQRLRSEIESVKKQCANLETAIADAEQRGDCALKDARAKLDELEGALQQAKEELARMLREYQELLSVKLSLDIEIATYRKLLEGEECRMSGEYTNSVSISVINSSMAGMAGTGAGFGFSNAGTYGYWPSSVSGGYSMLPGGCVTGSGNCSPRGEARTRLGSASEFRDSQGKTLALSSPTKKTMR

SEQ ID NO: 631 - DNA, 1726 bp, Homo sapiens
  CDS (350)..(1486)
gtcaggttcatggttacgaagctgctgaccccaggatcccagcccgtgggagagaagggggtctctgacagcccccacccctccccactgccagatccttattgggtctgagtttcaggggtggggccccagctggaggttataaaacagctcaatcggggagtacaaccttcggtttctcttcggggaaagctgctttcagcgcacacgggaagatatcagaaacatcctaggatcaggacaccccagatcttctcaactggaaccacgaaggctgtttcttccacacagcactttgatctccatttaagcaggcacctctgtcctgcgttccggagctgcgttcccgatggtcctcctttggctcacgctgctcctgatcgccctgccctgtctcctgcaaacgaaggaagatccaaacccaccaatcacgaacctaaggatgaaagcaaaggctcagcagttgacctgggaccttaacagaaatgtgaccgatatcgagtgtgttaaagacgccgactattctatgccggcagtgaacaatagctattgccagtttggagcaatttccttatgtgaagtgaccaactacaccgtccgagtggccaacccaccattctccacgtggatcctcttccctgagaacagtgggaagccttgggcaggtgcggagaatctgacctgctggattcatgacgtggatttcttgagctgcagctgggcggtaggcccgggggcccccgcggacgtccagtacgacctgtacttgaacgttgccaacaggcgtcaacagtacgagtgtcttcactacaaaacggatgctcagggaacacgtatcgggtgtcgtttcgatgacatctctcgactctccagcggttctcaaagttcccacatcctggtgcggggcaggagcgcagccttcggtatcccctgcacagataagtttgtcgtcttttcacagattgagatattaactccacccaacatgactgcaaagtgtaataagacacattcctttatgcactggaaaatgagaagtcatttcaatcgcaaatttcgctatgagcttcagatacaaaagagaatgcagcctgtaatcacagaacaggtcagagacagaacctccttccagctactcaatcctggaacgtacacagtacaaataagagcccgggaaagagtgtatgaattcttgagcgcctggagcaccccccagcgcttcgagtgcgaccaggaggagggcgcaaacacacgtgcctggcggacgtcgctgctgatcgcgctggggacgctgctggccctggtctgtgtcttcgtgatctgcagaaggtatctggtgatgcagagactctttccccgcatccctcacatgaaagaccccatcggtgacagcttccaaaacgacaagctggtggtctgggaggcgggcaaagccggcctggaggagtgtctggtgactgaagtacaggtcgtgcagaaaacttgagactggggttcagggcttgtgggggtctgcctcaatctccctggccgggccaggcgcctgcacagactggctgctggacctgcgcacgcagcccaggaatggacattcctaacgggtggtgggcatgggagatgcctgtgtaatttcgtccgaagctgccaggaagaagaacagaactttgtgtgtttatttcatgataaagtgatttttttttttttaacccaaaaaaaaaaaaaaaaa

SEQ ID NO: 632 - protein, 378 aa, Homo sapiens
MVLLWLTLLLIALPCLLQTKEDPNPPITNLRMKAKAQQLTWDLNRNVTDIECVKDADYSMPAVNNSYCQFGAISLCEVTNYTVRVANPPFSTWILFPENSGKPWAGAENLTCWIHDVDFLSCSWAVGPGAPADVQYDLYLNVANRRQQYECLHYKTDAQGTRIGCRFDDISRLSSGSQSSHILVRGRSAAFGIPCTDKFVVFSQIEILTPPNMTAKCNKTHSFMHWKMRSHFNRKFRYELQIQKRMQPVITEQVRDRTSFQLLNPGTYTVQIRARERVYEFLSAWSTPQRFECDQEEGANTRAWRTSLLIALGTLLALVCVFVICRRYLVMQRLFPRIPHMKDPIGDSFQNDKLVVWEAGKAGLEECLVTEVQVVQKT

SEQ ID NO: 633 - DNA, 966 bp, Homo sapiens
  CDS (1)..(966)
atggtcaatttgacttcaatgagtggattccttcttatggggttttctgatgagcgtaagcttcagattttacatgcattggtatttctggtgacatacctgctggccttgacaggcaacctcctcattatcaccatcattaccgtggaccgtcgtctccattcccccatgtattactttttaaagcacctctctcttctggacctctgcttcatctctgtcacagtcccccagtccattgcaaattcacttatgggcaacggttacatttctcttgttcagtgcattcttcaggttttcttcttcatagctctggcctcatcagaagtggccattctcacagtgatgtcttatgacaggtacgcagcaatctgtcaaccacttcattatgagactattatggatccccgtgcctgtaggcatgcagtgatagctgtgtggattgctgggggcctctctgggctcatgcatgctgccattaacttctccatacctctctgtgggaagagagtcattcaccaattcttctgtgatgttcctcagatgctgaaactagcctgttcttatgaattcattaatgagattgcactggctgcattcacaacgtctgcagcatttatctgtttgatctccattgtgctctcctacattcgcatcttctctacagtgctgagaatcccatcagctgagggccggaccaaggtcttctccacctgcctaccacacctatttgtagccaccttctttctttcagctgcaggctttgagtttctcagactgccttctgattcctcatcgactgtggaccttgtattctccgtattctatactgtgatacctccaacactcaatccagtcatttatagcttacggaatgattccatgaaggcagcactgaggaagatgctgtcaaaggaagagcttcctcagagaaaaatgtgcttaaaagccatgtttaaactctga

SEQ ID NO: 634 - protein, 321 aa, Homo sapiens
MVNLTSMSGFLLMGFSDERKLQILHALVFLVTYLLALTGNLLIITIITVDRRLHSPMYYFLKHLSLLDLCFISVTVPQSIANSLMGNGYISLVQCILQVFFFIALASSEVAILTVMSYDRYAAICQPLHYETIMDPRACRHAVIAVWIAGGLSGLMHAAINFSIPLCGKRVIHQFFCDVPQMLKLACSYEFINEIALAAFTTSAAFICLISIVLSYIRIFSTVLRIPSAEGRTKVFSTCLPHLFVATFFLSAAGFEFLRLPSDSSSTVDLVFSVFYTVIPPTLNPVIYSLRNDSMKAALRKMLSKEELPQRKMCLKAMFKL

SEQ ID NO: 635 - DNA, 1913 bp, Homo sapiens
  CDS (224)..(1396)
ccggagagcgagatcaaagggactggaaacagactggggactggcggggggagggggccggccagcctgtggagtcctccctgagaagcggagggcccggcttccaccgtgactccagcggcctgcttggggttttaattattattttgaaatttctgaatcgagctagagcgagagagcgagagatctccgtagactgcgactcgctggctttcgctccgagatgatgcagagtgcgactgtccccgcggaaggggctgtcaaggggctcccggagatgctaggtgtgccgatgcaacagattccccagtgcgctggctgcaaccagcacatcctggacaagttcatcctgaaggtcctggacagacactggcacagctcctgcctcaagtgtgcagactgccagatgcagctggcggacaggtgcttctccagggctgggagcgtctactgcaaggaggacttcttcaagcgcttcggcacaaaatgcacggcctgccagcagggtatccccccaacccaggtggtccgcaaggcccaggactttgtctaccacctgcactgctttgcttgcatcatctgcaaccggcagctggccacgggggacgaattctacctcatggaggacgggcggctggtgtgcaaggaagactacgagacagccaagcagaacgatgactcagaggctggagctaagcggccccggaccaccatcacagccaagcagctggagacattaaagaatgcatacaagaactcccccaagcctgcccggcacgtgagggagcagctgtcctcagagacaggcctggacatgagggtcgtacaggtttggtttcagaacagaagggccaaagagaaacgcctgaagaaggatgcagggcggcaccgctgggggcagttctataagagcgtcaagaggagccggggcagcagcaagcaggagaaggagagctctgcagaggactgtggggttagtgacagtgagctgagcttccgagaggatcaaattctctcagaacttggccacaccaataggatttatggcaacgtgggggacgttacaggcggacagttaatgaatgggagcttctccatggacgggacaggacaatcctatcaggacttgagggatgggagcccctatggaatcccccagtctccatcctccatatcgtccctgccatcccacgctcctttgctcaatgggctggattacacggtggacagtaatttgggcatcattgcgcatgcagggcagggagtaagccagacgctgagagccatggctgggggacccacctctgacatctccacaggaagcagtgtaggctatcccgactttccaactagcccaggctcttggctcgatgaaatggatcatcctcctttttaaacttctctcctccccaccctacctgcccccctggcttgagagaatatcttcaaggatcaaaagagacttgccttttaaggatcgaaagtacgccaatgtgaatttccattattttcaatggaagtcctccgctgattcctagaaggctgtgagaccacactagggcattgtttccctggggaagcagtgggagagcagactcatctcagaacacagcacagggggtaatggcctagagctctagggacactggcttgttgggtctctcccctgctgttctgcttaggggcttggctgctcagtgctttggtagcacaaggtgactgtgataggcccccttggcctttgggaactttgctccaactggtgtgtctcacacaatgcctcccaaaacactgctctcaccagaactgagactcctaaggtagaggcctcacagcccttgagtaaaataaaagtgatttctggaccatcaaaaaaaaaaaaaaaaaaaaaaaaaaaaaaaaaaaaaaaaaaa

SEQ ID NO: 636 - protein, 390 aa, Homo sapiens
MMQSATVPAEGAVKGLPEMLGVPMQQIPQCAGCNQHILDKFILKVLDRHWHSSCLKCADCQMQLADRCFSRAGSVYCKEDFFKRFGTKCTACQQGIPPTQVVRKAQDFVYHLHCFACIICNRQLATGDEFYLMEDGRLVCKEDYETAKQNDDSEAGAKRPRTTITAKQLETLKNAYKNSPKPARHVREQLSSETGLDMRVVQVWFQNRRAKEKRLKKDAGRHRWGQFYKSVKRSRGSSKQEKESSAEDCGVSDSELSFREDQILSELGHTNRIYGNVGDVTGGQLMNGSFSMDGTGQSYQDLRDGSPYGIPQSPSSISSLPSHAPLLNGLDYTVDSNLGIIAHAGQGVSQTLRAMAGGPTSDISTGSSVGYPDFPTSPGSWLDEMDHPPF

SEQ ID NO: 637 - DNA, 4199 bp, Homo sapiens
  CDS (460)..(2985)
agaaaaggaggaaggagaacattgctgtagcttggatctacaacctaagaaagcaagagtgatcaatctcagctctgttaaacatcttgtttacttactgcattcagcagcttgcaaatggttaactatatgcaaaaaagtcagcatagctgtgaagtatgccgtgaattttaattgagggaaaaagggacaattgcttcaggatgctctagtatgcactctgcttgaaatattttcaatgaaatgctcagtattctatctttgaccagaggttttaactttatgaagctatgggacttgacaaaaagtgatatttgagaagaaagtacgcagtggttggtgttttcttttttttaataaaggaattgaattactttgaacacctcttccagctgtgcattacagataacgtcaggaagagtctctgctttacagaatcggatttcatcacatgacaacatgaagctgtggattcatctcttttattcatctctccttgcctgtatatctttacactcccaaactccagtgctctcatccagaggctcttgtgattctctttgcaattgtgaggaaaaagatggcacaatgctaataaattgtgaagcaaaaggtatcaagatggtatctgaaataagtgtgccaccatcacgacctttccaactaagcttattaaataacggcttgacgatgcttcacacaaatgacttttctgggcttaccaatgctatttcaatacaccttggatttaacaatattgcagatattgagataggtgcatttaatggccttggcctcctgaaacaacttcatatcaatcacaattctttagaaattcttaaagaggatactttccatggactggaaaacctggaattcctgcaagcagataacaattttatcacagtgattgaaccaagtgcctttagcaagctcaacagactcaaagtgttaattttaaatgacaatgctattgagagtcttcctccaaacatcttccgatttgttcctttaacccatctagatcttcgtggaaatcaattacaaacattgccttatgttggttttctcgaacacattggccgaatattggatcttcagttggaggacaacaaatgggcctgcaattgtgacttattgcagttaaaaacttggttggagaacatgcctccacagtctataattggtgatgttgtctgcaacagccctccattttttaaaggaagtatactcagtagactaaagaaggaatctatttgccctactccaccagtgtatgaagaacatgaggatccttcaggatcattacatctggcagcaacatcttcaataaatgatagtcgcatgtcaactaagaccacgtccattctaaaactacccaccaaagcaccaggtttgataccttatattacaaagccatccactcaacttccaggaccttactgccctattccttgtaactgcaaagtcctatccccatcaggacttctaatacattgtcaggagcgcaacattgaaagcttatcagatctgagacctcctccgcaaaatcctagaaagctcattctagcgggaaatattattcacagtttaatgaagtctgatctagtggaatatttcactttggaaatgcttcacttgggaaacaatcgtattgaagttcttgaagaaggatcgtttatgaacctaacgagattacaaaaactctatctaaatggtaaccacctgaccaaattaagtaaaggcatgttccttggtctccataatcttgaatacttatatcttgaatacaatgccattaaggaaatactgccaggaacctttaatccaatgcctaaacttaaagtcctgtatttaaataacaacctcctccaagttttaccaccacatattttttcaggggttcctctaactaaggtaaatcttaaaacaaaccagtttacccatctacctgtaagtaatattttggatgatcttgatttgctaacccagattgaccttgaggataacccctgggactgctcctgtgacctggttggactgcagcaatggatacaaaagttaagcaagaacacagtgacagatgacatcctctgcacttcccccgggcatctcgacaaaaaggaattgaaagccctaaatagtgaaattctctgtccaggtttagtaaataacccatccatgccaacacagactagttaccttatggtcaccactcctgcaacaacaacaaatacggctgatactattttacgatctcttacggacgctgtgccactgtctgttctaatattgggacttctgattatgttcatcactattgttttctgtgctgcagggatagtggttcttgttcttcaccgcaggagaagatacaaaaagaaacaagtagatgagcaaatgagagacaacagtcctgtgcatcttcagtacagcatgtatggccataaaaccactcatcacactactgaaagaccctctgcctcactctatgaacagcacatggtgagccccatggttcatgtctatagaagtccatcctttggtccaaagcatctggaagaggaagaagagaggaatgagaaagaaggaagtgatgcaaaacatctccaaagaagtcttttggaacaggaaaatcattcaccactcacagggtcaaatatgaaatacaaaaccacgaaccaatcaacagaatttttatccttccaagatgccagctcattgtacagaaacattttagaaaaagaaagggaacttcagcaactgggaatcacagaatacctaaggaaaaacattgctcagctccagcctgatatggaggcacattatcctggagcccacgaagagctgaagttaatggaaacattaatgtactcacgtccaaggaaggtattagtggaacagacaaaaaatgagtattttgaacttaaagctaatttacatgctgaacctgactatttagaagtcctggagcagcaaacatagatggagagtttgagggctttcgcagaaatgctgtgattctgttttaagtccataccttgtaaataagtgccttacgtgagtgtgtcatcaatcagaacctaagcacagcagtaaactatggggaaaaaaaaagaagaagaaaaagaaactcagggatcactgggagaagccatggcattatcttcaggcaatttagtctgtcccaaataaaataaatccttgcatgtaaatcattcaaggattatagtaatatttcatatactgaaaagtgtctcataggagtcctcttgcacatctaaaaaggctgaacatttaagtatcccgaattttcttgaattgctttccctatagattaattacaattggatttcatcatttaaaaaccatacttgtatatgtagttataatatgtaaggaatacattgtttataaccagtatgtacttcaaaaatgtgtattgtcaaacatacctaactttcttgcaataaatgcaaaagaaactggaacttgacaattataaatagtaatagtgaagaaaaaatagaaaggttgcaattatataggccatgggtggctcaaaactttgaacatttgagcttaaacaaatgccactctcatgcattctaaattaaaaagttaaaatgattaatagttcaggtggaagaaataagcatactttttgggttttctacacattttgtgtagacaattttaatgtcagtgctgctgtgaactaaagtatgtcatttatgctcaaagtttaattcttcttcttgggatattttaaaaatgctactgagattctgctgtaaatatgactagagaatatattgggtttgctttatttcataggcttaattctttgtaaatctgaatgaccataatagaaatacatttcttgtggcaagtaattcacagttgtaaagtaaataggaaaaattattttatttttattgatgtacattgatagatgccataaatcagtagcaaaaggcacttctaaaggtaagtggtttaagttgcctcaagagagggacaatgtagctttattttacaagaaggcatagttagatttctatgaaatatttattctgtacagttttatatagttttggttcacaaaagtaattattcttgggtgcctttcaagaaaattaaaaatactactcactacaataaaactaaaatgaaaactcaaaaaaaaaaaaaaaaaa

SEQ ID NO: 638 - protein, 841 aa, Homo sapiens
MKLWIHLFYSSLLACISLHSQTPVLSSRGSCDSLCNCEEKDGTMLINCEAKGIKMVSEISVPPSRPFQLSLLNNGLTMLHTNDFSGLTNAISIHLGFNNIADIEIGAFNGLGLLKQLHINHNSLEILKEDTFHGLENLEFLQADNNFITVIEPSAFSKLNRLKVLILNDNAIESLPPNIFRFVPLTHLDLRGNQLQTLPYVGFLEHIGRILDLQLEDNKWACNCDLLQLKTWLENMPPQSIIGDVVCNSPPFFKGSILSRLKKESICPTPPVYEEHEDPSGSLHLAATSSINDSRMSTKTTSILKLPTKAPGLIPYITKPSTQLPGPYCPIPCNCKVLSPSGLLIHCQERNIESLSDLRPPPQNPRKLILAGNIIHSLMKSDLVEYFTLEMLHLGNNRIEVLEEGSFMNLTRLQKLYLNGNHLTKLSKGMFLGLHNLEYLYLEYNAIKEILPGTFNPMPKLKVLYLNNNLLQVLPPHIFSGVPLTKVNLKTNQFTHLPVSNILDDLDLLTQIDLEDNPWDCSCDLVGLQQWIQKLSKNTVTDDILCTSPGHLDKKELKALNSEILCPGLVNNPSMPTQTSYLMVTTPATTTNTADTILRSLTDAVPLSVLILGLLIMFITIVFCAAGIVVLVLHRRRRYKKKQVDEQMRDNSPVHLQYSMYGHKTTHHTTERPSASLYEQHMVSPMVHVYRSPSFGPKHLEEEEERNEKEGSDAKHLQRSLLEQENHSPLTGSNMKYKTTNQSTEFLSFQDASSLYRNILEKERELQQLGITEYLRKNIAQLQPDMEAHYPGAHEELKLMETLMYSRPRKVLVEQTKNEYFELKANLHAEPDYLEVLEQQT

SEQ ID NO: 639 - DNA, 437 bp, Homo sapiens
  CDS (1)..(384)
atgccggaggtgtcatctaaaggtgctaccatttccaagaagggctttaagaaagctgtcgttaagacccagaaaaaggaaggcaaaaagcgcaagaggacccgtaaggagagttattctatttacatctacaaagtgctaaagcaggtccatccggacactggcatctcttcgaaagctatgagcattatgaattccttcgtcactgatatctttgagcgtatagcgagcgaggcatcacgtttggctcactacagcaagcgctccaccatttcttccagagagattcagacagcagtgcgcttgctactgccgggagagctggctaaacatgctgtgtctgagggcaccaaggctgtcactaagtacaccagctccaagtaagcctgctaagtaaacgtcatttctaacccaaaggctcttttcagagccactta

SEQ ID NO: 640 - protein, 127 aa, Homo sapiens
MPEVSSKGATISKKGFKKAVVKTQKKEGKKRKRTRKESYSIYIYKVLKQVHPDTGISSKAMSIMNSFVTDIFERIASEASRLAHYSKRSTISSREIQTAVRLLLPGELAKHAVSEGTKAVTKYTSSK

SEQ ID NO: 641 - DNA, 4544 bp, Homo sapiens
  CDS (149)..(1942)
agcacaggcacgtcccgggggctccagcttctgctcagagcgcggagagccgggccgggcgggcgcgcgcgcaggactcgggccgctcgaggggtccggccggacggtgtcgggagccggacccgtcggcagaggagcgggcgccgcgatggctgagggcagtgccgtgtctgaccctcagcacgccgcgcgtctgctgcgagcgctcagctctttccgcgaggagtctcgcttctgcgacgcgcacctggtcctcgacggggaggagatcccggtgcagaagaacatcctggcggcggccagcccgtacatcaggacaaagttaaactataatcctccaaaagatgatggatcaacttataagattgaacttgaagggatatcggtaatggttatgagagagatcctggattacatcttcagtgggcagatcaggctaaatgaagatacaatccaagatgttgttcaggcagctgacctgctgctactgacggaccttaaaaccctgtgctgtgagtttttggaaggctgcattgctgctgagaactgtattggtatccgtgactttgcactacattactgcctccatcacgttcattaccttgccacagaatacctggagactcatttccgagacgtcagcagcacggaagaattcttagagctgagtcctcaaaagcttaaagaagtgatttctcttgagaagttaaacgttggcaatgaaagatatgtctttgaagcagtaattcgatggatagcacatgatacagaaataagaaaggtccacatgaaggatgttatgtcagctctgtgggtttcagggttggactccagttatttacgggaacagatgctgaatgaaccattagtacgagaaattgtcaaagagtgtagcaatataccgctcagccagccgcagcaaggggaggcgatgctggccaacttcaaaccccggggctactctgagtgcatcgtgactgttggtggagaagagagagtttcacggaaacccacagcagcgatgcgatgcatgtgccctctctatgaccctaacaggcagctttggatcgaactggcccctttaagcatgccgagaattaaccatggagttctctcagcagaaggatttttgtttgtattcgggggccaagatgaaaataagcagactcttagctcaggagaaaagtatgatccagatgcaaatacatggacagcattgccacctatgaacgaggcaagacataacttcggaattgtggagatagatgggatgctgtacattttgggaggagaggatggtgaaaaggagctgatttccatggagtgttacgatatttattctaaaacctggacaaagcaacctgatttgaccatggtcagaaagatcggctgctatgcagctatgaaaaagaaaatctacgccatgggtggaggctcctacggaaagctttttgagtctgtagagtgttatgatcccaggacccagcagtggactgccatatgtccactaaaagagaggaggtttggagcggtggcctgtggagttgctatggagctgtatgtgtttgggggagtccgaagtcgtgaggacgcccagggtagcgagatggtaacttgcaagtccgagttctaccatgatgagtttaaaaggtggatctatcttaacgaccagaatttatgcatccccgccagttcctcttttgtttatggagctgtacctataggagccagtatttatgttattggagatcttgatacaggtaccaattacgactacgtgcgtgagtttaaaagaagcacaggaacctggcaccacactaaaccactccttccatccgaccttcgccgtacaggatgtgcagccttacgcattgcgaattgcaagcttttccgcctgcagcttcagcaaggcttattccgtattcgtgttcattccccttgaggaggaagcagagcagagtgcgagatcctgacccaagagcaccataacatagctccgaaagggagagcagagatggcagctgaaactcactctgtgctgggctttggtatggtaactctttggtggttttatgatgcttacaaacttgagctttagctcttgtttgggagaacacgtaactgttgaaaaactacctgggaggagtgagttcctccagttaaatgtggctgtagatgttggaggctagggaggctagtaaatatcaaaaggaaaagggagtgggaattgctatcatgtaaaatatcaaagttaaaatactaaggtgcattttccctgaagggaactcatgtctgactgctgtattcaaatacgtagctttggtaacaaacaaaatccgtatatgcaaatcaacatatccaaacatgccaagactgcttttccactgcacttggaaggatatattatgcctaaccctgcccaacaaattaaggtttgtgcctaaaatgttagattggactgtatgccagttagtctccatttattcctagtactctgtcctaagaatctttttaaaactatatcatgatgaattgaaatgaagataaaattgctcttttgtaactttatcttagtaatgtaaagattcagtaaattgatgagtcaggttgcagccctcatgtgaactgaaagaagttgctcgcttctgtgttgacttagatcaagacacgtcacgcatcctttctggggtagtacctgtggagccgggaagggtctcctgcagtgccattctgccttctcaatgagcaaaaccattttctaagtatgaggatattagtgagtaggagattttataaaagaaagacctgagtcagacaaataataaaggtctgctgtggctaaaaaagcaaaaacaaaaaagctatccagacaaaatacatagggatcagaaactttttcatataacctgtctgaaagcacacaaagtcttgtttactactgtttagggtttgaaaacttgtcttagaatgcgaatctgtgttaagaatctagtctttgtaatagaagtttcccagtggcattcactagtgagagttttagacaaattatgttacgagtaaagtttggctggtagaataaactacctcaacttaatttcattctgttcatagtagagcaaattaatcttttcctccttccctcctttcctatctctcattctcacctcaacccactttaccccacttctcattgggggaaaaatgtctttcgttcgtggaacgtatcttgtaagatattttgttttccacttgaattacaccaccctagtgtgaaatcggggacttcaaagtgcttgattccttcctaaattgaattttatgcaatgtcaaatttctaatcaatttaatatacagtacttcatttttaattgttttctaaaaaaaaggttttttttttccttttggaatatggctgtaagaagcagcattttgtcttattaacacatgtataaaggtatcctttggttttaagtcgagaacaggaatttcttctagaaacttcctgtatggaacgtttatatgcaattaacatgcatatgaaaaacatcacttacgttctcccacccatagacataaaaaagggtgacctgtgattttttttcttatacctgctggaagtcagtacaatgcgtcaaaagttgctgaaagatgctgtgcctatggggttctagagagtgttgagtgtggtacattaactctccattttagccagaagatacctgataagagaaggtgtaaggtttttatcttatatgccagaggcaccaggccagatgtgccgcacagtcatgtaattcaatcatgtttaatatgtcagtcaaaaccaaattcagaattgttttgtgtaccagtcagctgttgtctgcacattttcgtagtgacagtgtggagatctttttaatgaaagcaaactatgtggcctctgcaaagaaaggaagatttttctttttacaactagatattagttttagaggaaggaaatagctgaaaaactaaatttgctttggtgaaatgtcctgtacagaacagtaccttggcattcagcagctgtaattggggaacattaaaacagtaactgacatccagttaaagccacgatcgtcagcaattctccttttttaatttctgatatttaaagttttttttccagtctacaccaggcctctccaaggagacagttcattatttaggagtgaatgtgttcctcttgcaatattatcagtacctgcatgacttggtaaattcattttataaaaatagtgttttttttttttaatttcagttcattgactctataactgcagaaattagataatgttttataaaataaatttgccacataatatgggatgcaataaccaacaaagctgctaagtgccaaactgttattttactatatataaatattaaaatattgtgttgaagtatagggatgtatttaattttactatgctccaacattaatcatgactcttttgtaaattacagttatttcagtattgtaaaataaatgttgactcatttcatgcaggtttgtgttttaa

SEQ ID NO: 642 - protein, 597 aa, Homo sapiens
MAEGSAVSDPQHAARLLRALSSFREESRFCDAHLVLDGEEIPVQKNILAAASPYIRTKLNYNPPKDDGSTYKIELEGISVMVMREILDYIFSGQIRLNEDTIQDVVQAADLLLLTDLKTLCCEFLEGCIAAENCIGIRDFALHYCLHHVHYLATEYLETHFRDVSSTEEFLELSPQKLKEVISLEKLNVGNERYVFEAVIRWIAHDTEIRKVHMKDVMSALWVSGLDSSYLREQMLNEPLVREIVKECSNIPLSQPQQGEAMLANFKPRGYSECIVTVGGEERVSRKPTAAMRCMCPLYDPNRQLWIELAPLSMPRINHGVLSAEGFLFVFGGQDENKQTLSSGEKYDPDANTWTALPPMNEARHNFGIVEIDGMLYILGGEDGEKELISMECYDIYSKTWTKQPDLTMVRKIGCYAAMKKKIYAMGGGSYGKLFESVECYDPRTQQWTAICPLKERRFGAVACGVAMELYVFGGVRSREDAQGSEMVTCKSEFYHDEFKRWIYLNDQNLCIPASSSFVYGAVPIGASIYVIGDLDTGTNYDYVREFKRSTGTWHHTKPLLPSDLRRTGCAALRIANCKLFRLQLQQGLFRIRVHSP

SEQ ID NO: 643 - DNA, 1999 bp, Homo sapiens
  CDS (725)..(1300)
tattctaatggagagaaacgcacgtgcacacacacccccctaaacccacacaaatgaaaccccctctgcggagaagccggctacaggaaattgacttaggcacaggaacttgctaatctcttttgtcacattcggattgctcctgctgccccacacacactaacccaaccatcttggggtggactccctgccagcccaactgttgtattttcagttcttccagtgtgaatcagttaatattctcgggaacgagggagaggttgatcctatgaggaaatcaaccacagtgaaaaggcttgggccgcttttgttttcacctgcttttgttgaacaaatttgatttccggagtcagtcattttactgtcaagacatttcttcggcattctgcaacagtttccaacatggctagatccatcagaaactgaagccgtggagaacgctctcggggcctttgccacttcttggagtagaagccgacagagagctgtttggaaacttctccttcacacaccagttgaagactaggctttggaggttttcaaagcagacggtgcttggatgggcagggagaagtaacattctgcaaatcgccgtcagaggtcctgaggacacagacctacctggcttgcattccccttgctgaatggcgtgtgctgcagctgcccactgagggctcttttccctgggattctggacttcagagtaggacagcaggctgggaagatgctgagttccatcaagtgcgtgttggtgggcgactctgctgtggggaaaacctctctgttggtgcgcttcacctccgagaccttcccggaggcctacaagcccacagtgtacgagaacacaggggtggacgtcttcatggatggcatccagatcagcctgggcctctgggacacagccggcaatgacgccttcagaagcatccggcccctgtcctaccagcaggcagacgtggtgctgatgtgctactctgtggccaaccataactcattcctgaacttgaagaacaagtggattggtgaaattaggagcaacttgccctgtacccctgtgctggtggtggccacccagactgaccagcgggagatggggccccacagggcctcctgcgtcaatgccatggaagggaagaaactggcccaggatgtcagagccaagggctacctggagtgctcagcccttagcaatcggggagtacagcaggtgtttgagtgcgccgtccgaactgccgtcaaccaggccaggagacgaaacagaaggaggctcttctccatcaatgagtgcaagatcttctaaaccccaagagacttcacacaacacttatgtatgcaccccaaagactaatggggagagggagggccgggaagccaggaaagcttggtgttttctctgggtacaccccaagcagcgtctccttttggatacagttattgatgaggcttggccactggatgttttcactaactacactctacaagtgaactccttgcccaggccagttagaaaatcccttggggaactgtgatgaatattccatctttgattaaaaaagtgaaatagtctccataattttggacgatgaagtgagtttttcaaagaattccatatttaaagacacattttatttaactaataacaaaatgtattgcttttgtatatatttagttttcacacttggaaaatcttttcctacatcctcgaaaacataaactcctctgtgagtgaaatgcttgtacgaagctctgccatatgtttgtagtgttattattttcacctcaagtagaaagtctgttgaaaccacttggctgctggatttaaatgggtaatcaaatttaaaaatgaccataaatgaatctttgcaatttgttttctacttacctgttattcacagttggatataaaatacagttccataagatatcctaatactgcctaatgattttaaagttatcactatatttttctgaaatgataaaacatcattcatttatttac

SEQ ID NO: 644 - protein, 191 aa, Homo sapiens
MLSSIKCVLVGDSAVGKTSLLVRFTSETFPEAYKPTVYENTGVDVFMDGIQISLGLWDTAGNDAFRSIRPLSYQQADVVLMCYSVANHNSFLNLKNKWIGEIRSNLPCTPVLVVATQTDQREMGPHRASCVNAMEGKKLAQDVRAKGYLECSALSNRGVQQVFECAVRTAVNQARRRNRRRLFSINECKIF

SEQ ID NO: 645 - DNA, 1609 bp, Homo sapiens
  CDS (1)..(1215)
atggaaagaggctggttccatgggaaaggattcctccttggcttcatcctccacctgctgctgcaagattcacaccttcaactggtgacatcgttcctgtggctaaatatgtggaacccagatgaatgcggaggcatcaagaagtccggcatggcaactgagaacctatggctttcagatgtcttcatcgaggagtctgtggatcagacacctgcaggtctcatggctagtatgtcaatagtgaaggccacatcaaacacaataagccaatgtgggtggtcagcatctgcaaactggacaccttctatttccccttccatggacagaggtgaacgctctccttcagccctttcacctacacaggtaacccgggcatggagaaggatgtccaggagctttcaaatacatcacagaacctcattcagaacaaggagggagtgggtactgctgggtatccaaaaaagaacaataaaggtgaccgtggccactaaccagtatgaacaagccatcttccatgtggccatcaggcgcaggtgcaggcccagcccctacgtggtaaactttctggtgcccagtggcattctgattgccatcgatgccctcagtttctacctgccactggaaagtgggaattgtgccccattcaagatgactgttctgctgggctacagcgtcttcctgctcatgatgaatgacttgctcccagccactagcacttcatcacatgcttcactagtacgtcctcatccatcaagagaccaaaagcgaggtgtctacttcgccctgtgcctgtccctgatggtgggcagcctgctggagaccatcttcatcacccacctgctgcacgtggccaccacccagcccctacctctgcctcggtggctccactccctgctgctgcactgcaccggccaagggagatgctgtcccactgcgccccagaagggaaataagggcccgggtctcacccccacccacctgcccggtgtgaaggagccagaggtatcagcagggcagatgccaggccctggggaggcagagctgacagggggctcagaatggacaagggcccagcgggaacacgaggcccagaagcagcactcggtggagctgtgggtgcagttcagccacgcgatggacgccctgctcttccgcctctacctgctcttcatggcctcctccatcatcaccgtcatatgcctctggaacacctaggcaggtgctcacctgcaaacttcagtctggacttctttttgccagagaactccagaaaccagtcaggctctcagtcagccttgtggccctgtcaaccgcctcatttttaacccagtcctctgtgtagtttcagaccagacctgaatagtctcctatgccctccaaaagtcgggtccttgctcctgcatgccatcagccccactcagccctcccatacctccctggctcctcaggattcaggttcctagggtacgtccttgattaaatcaccccaatatgcccctttgcagaaagtattggcttttccctgaattctgttatggtaaaaaaaatcttgggattgagagtcttcttgcagaaacttctcagccaaagtaaaaaggattttctctta

SEQ ID NO: 646 - protein, 404 aa, Homo sapiens
MERGWFHGKGFLLGFILHLLLQDSHLQLVTSFLWLNMWNPDECGGIKKSGMATENLWLSDVFIEESVDQTPAGLMASMSIVKATSNTISQCGWSASANWTPSISPSMDRGERSPSALSPTQVTRAWRRMSRSFQIHHRTSFRTRREWVLLGIQKRTIKVTVATNQYEQAIFHVAIRRRCRPSPYVVNFLVPSGILIAIDALSFYLPLESGNCAPFKMTVLLGYSVFLLMMNDLLPATSTSSHASLVRPHPSRDQKRGVYFALCLSLMVGSLLETIFITHLLHVATTQPLPLPRWLHSLLLHCTGQGRCCPTAPQKGNKGPGLTPTHLPGVKEPEVSAGQMPGPGEAELTGGSEWTRAQREHEAQKQHSVELWVQFSHAMDALLFRLYLLFMASSIITVICLWNT

SEQ ID NO: 647 - DNA, 2144 bp, Homo sapiens
  CDS (34)..(1641)
cctctcatcctgccctccggcccctctgcagctatgaggtcctccgtctctcggcaaacatactccacaaaagggggcttcagctccaactctgccagcggagggagtgggtcccaggcccgcaccagcttcagctcagtgacggtgtctcggagcagtggcagtggtggcggggcccactgtggccccggcacaggtggctttggcagccgaagcctctataacttggggggccacaagagtatctctgtcagtgtggccggaggggccttgttggggcgggctctggggggctttggctttggcagcagggcatttatgggacagggggctggcaggcagacgtttgggcctgcttgtcctcctggggggatccaggaggtcactgtcaaccagagcctgctgacccccctccatgtggagattgaccccgagatccagcgagtgcgcactcaggagcgggagcagatcaagaccctcaacaacaagttcgcctccttcatcgacaaggtgcggttcctggagcaacagaataaggtgctggagaccaagtgggcactgctgcaggagcagggccagaacttgggtgtcaccaggaacaacctggagcccctctttgaggcctacctgggtagcatgcggagcacgctggacagacttcagagcgagcgggggaggctggactcagagctcaggaacgtgcaggaccttgtggaggacttcaagaacaagtacgaggatgaaatcaacaagcacactgctgcagagaacgagtttgtggtgctcaagaaggatgtggatgcagcatacatgggccggatggatctgcatggcaaagtgggcaccttgacccaggagattgacttcctgcagcaactctatgaaatggagctgagccaagtgcagacccacgtgtctaacaccaatgtggtgctgtccatggacaacaaccgcaacctggacctggacagcatcatcgccgaggtcaaggcccagtatgagctgattgcccagaggagccgggctgaggccgaggcctggtaccagaccaagtatgaggagctgcaggtgactgctgggaagcatggggacaacctgcgggacaccaagaacgagattgctgagctcacccgcactatccagaggctgcagggggaggctgatgcagccaagaagcagtgtcagcagctgcagacggccattgcggaagcggagcagcgtggggagctggcactcaaggatgctcagaagaagcttggggatctggatgtggccctgcaccaggccaaggaggacctgacacggctgctgcgtgactaccaggagctgatgaatgtcaagctggccctggacgtggagattgccacctaccgcaagcttctggagagcgaggagagcaggatgtctggagaatgtcccagtgcagtcagcatttctgtgactggcaactccaccactgtgtgcggaggtggcgcagccagctttggaggtggcatctccctgggtgggagtgggggggccaccaagggtggattcagcacaaatgtgggctatagcaccgtcaagggagggccagtctctgcgggcacctccatcctgcggaagaccactacggtcaagacgtccagccagaggtattagctgctgagccctgcaagggcccctgcaatcctgtccctgccctcctcaccccacctctgctgtcctttccagtcacttctcaggagcaggaacagccaggggacctcagacccagggtattttcataccagactatttgcatcttgggaagcgctcaaatctactcaggttttctccttggtcctgcagtaggatgggagggaaggttaaagttgccagcttgagtgatgtgcttgggtgacttgggggtgaccttttgaccaccgagaggaggctgaatttctcaagccattaggagagagagaaattgggagtggtccccaaagacccttcaacctccccagtcccccaccagacccaccctctccctgaatctacccacatcccccttccctgtctgtgtctcaataaatggtgcaactgcaaaaaaaaaaaaaaaaaaaaaaaaaaaaaaaaaaaaaaaaaaaaaaaaaaaaaaaaaaaaaaaaaaaaaaaaaaaaaaa

SEQ ID NO: 648 - protein, 535 aa, Homo sapiens
MRSSVSRQTYSTKGGFSSNSASGGSGSQARTSFSSVTVSRSSGSGGGAHCGPGTGGFGSRSLYNLGGHKSISVSVAGGALLGRALGGFGFGSRAFMGQGAGRQTFGPACPPGGIQEVTVNQSLLTPLHVEIDPEIQRVRTQEREQIKTLNNKFASFIDKVRFLEQQNKVLETKWALLQEQGQNLGVTRNNLEPLFEAYLGSMRSTLDRLQSERGRLDSELRNVQDLVEDFKNKYEDEINKHTAAENEFVVLKKDVDAAYMGRMDLHGKVGTLTQEIDFLQQLYEMELSQVQTHVSNTNVVLSMDNNRNLDLDSIIAEVKAQYELIAQRSRAEAEAWYQTKYEELQVTAGKHGDNLRDTKNEIAELTRTIQRLQGEADAAKKQCQQLQTAIAEAEQRGELALKDAQKKLGDLDVALHQAKEDLTRLLRDYQELMNVKLALDVEIATYRKLLESEESRMSGECPSAVSISVTGNSTTVCGGGAASFGGGISLGGSGGATKGGFSTNVGYSTVKGGPVSAGTSILRKTTTVKTSSQRY

SEQ ID NO: 649 - DNA, 3615 bp, Homo sapiens
  CDS (149)..(2077)
acttccggtctccggggtcgacgacatagcgggtcgtatttttatccaaaagaaggacctggaggaggatgagagcgttactgctgcacacctaaagtcaagggggagaagcccgaggaagattgaccagttttgtaattctagcaacatggtccatggatcagtgacattcagggatgtggccattgacttctctcaggaggagtgggagtgcctgcagcctgatcagaggaccttgtacagggatgtgatgttggagaactacagccacctgatctcactggcaggaagttccatttctaaaccagatgtaattacgttactagagcaagagaaagagccctggatggttgtaaggaaagaaacaagcagacggtatccagatttggagttaaaatatggacctgagaaagtatctccagaaaatgatacctctgaagtaaatttacccaaacaggttataaagcaaataagtacaactcttggcattgaggccttttattttagaaatgactcagaatatagacaatttgagggactacagggatatcaagaaggaaatatcaatcaaaagatgatcagctatgaaaaactgcctactcatactcctcatgcttctcttatttgcaatacacataaaccgtatgaatgtaaggaatgtgggaaatactttagtcgtagtgcaaatcttattcagcatcagagtattcatactggagagaaaccctttgaatgtaaggagtgtgggaaagcctttcgacttcacatacaatttactcgacatcagaaatttcatactggtgagaaaccttttgaatgtaacgaatgtggaaaggcctttagtcttcttaccctgcttaatcgccataagaacattcacacaggtgagaaactgtttgaatgtaaggaatgtgggaagtcctttaatcgtagctcaaaccttgttcaacatcagagtattcattctggtgtaaaaccatatgaatgtaaggagtgtgggaaaggctttaatcgtggtgcacaccttattcagcatcagaaaattcattccaatgagaaaccctttgtatgtaaggaatgtgggatggcctttcgatatcattaccaacttattgaacattgccaaattcatactggtgagaaaccctttgaatgtaaagaatgtggaaaggcgtttactcttctgacaaagcttgttcgacatcagaagattcatactggtgagaaaccctttgaatgcagggaatgtgggaaggcctttagtcttctcaaccagcttaatcgccataagaacattcacacaggtgaaaaaccgtttgaatgtaaggaatgtgggaagtcctttaatcgtagctcaaaccttgttcaacatcagagtattcatgctggtataaaaccatatgaatgtaaggagtgtgggaaaggctttaatcgtggtgcacaccttattcagcatcagaaaattcattccaatgagaaaccttttgtatgtagggaatgtgagatggcctttagatatcattgccaacttattgaacattctcgaattcatactggtgacaagccatttgaatgtcaagactgtgggaaggccttcaatcgtggctcaagccttgttcaacatcagagtattcacactggtgagaagccctatgaatgtaaggagtgtgggaaggcttttagactttacctacaactttcccaacatcagaaaactcacacaggtgaaaaaccatttgaatgtaaggaatgtgggaaattctttcgtcgtggttcaaatcttaatcaacatcgaagtattcatactggaaagaaaccctttgaatgtaaggaatgtgggaaagcctttcgacttcatatgcaccttattcgacatcagaaattgcatactggtgagaaaccctttgaatgtaaggagtgtgggaaagcctttcgacttcatatgcaacttattcgacatcagaaattgcatactggtgagaaaccctttgaatgtaaggaatgtggaaaggtttttagtcttcccacccagcttaatcgccataagaacattcacacaggtgagaaggcatcttgaatgtaaggaatgtggaaagtcctttaatcgtgtctcaaaccatgttcaacatcagagtattcgtgctggtgtaaaaccatgtgaatgtaaggggtgtgggaaaggcttcatttgtggttcaaacgttattcagcatcagaaaattcattccagtgagaaactctttgtatgcaaggagtggaggacgacctttagatatcattaccacttatttaacattaccaaattcacactggtaaaaaaccctttgaatgtaaagaatgtggaaaggccttcagttttctgacacagcttgctggacttcaggtcattcatactggcgagaagccatttgaatttgagaaatgtgggaaggccttcaatagtggctcaaaccttgttcaacatcagagtattcatactggtgagaaactctatgaatgtaaggagtgtgggaaaactttcagatttagtttggtcctgactgcacatcaaagaattcatactggtatgaaaccctgtgaatgtacagaatgtgggaagacctttagttgtagctcaaacattgttcaacatgttaaaattcatactggtgagaaacgctataatgtaaggaatatgggaaagcatttgctgtggatgatcagctgtctcaacatcagaaaattcagaatagttagaaattttgtgacaataaggagtgtggacaagccttcactgtgtacgaaaaatttactcaacaccagagagctcatattgatgagaaatcttgtgaacataaaagaatgtgtgaagaactttcatcatggcctgggatttgctcaacttctgagtattcatacttctgagaaatctttgagtgtaaggaatgtggggcgttttatagccacactaaataccttagagttcggagaagataattcttgtgagaaagtctttgaatgaggaatatagggtagttgtcatgttcacaatgtactccctatgaaataatttaccagatacaggcatacctcgctgaattgtgcattgcagttattgtgttttatacaaactgaaggtttgtggcaaccctgtggtgagcaagacgatcaggtccattttcccaacgtcaggtgtgcatttcatgtctttatgtcacattttggtaattctcagaatatttcaaactatttcattgttatatatctatcatggtgatcaatgaccagtgatttttgatgttgctattgtaattgctttgggataccacaaattctgcccataaaagatggtaaacctagttgatacttgttgtgggttttgaaagaatagtcaaatatacaatcatataccccaacctagattcaaaattgttaacaatttgcacgtttattttttgtatatttgttgtaccattgagaataagttttagacatcatgacactttaccctttatttaatcaacgtgtgtatcaaccaaacatgaagacaatatagacaatatcatatagccattgtaccataattaccgttaaggaaagtattcataattctgtaatatcaaaaaaaaaaaaaaa

SEQ ID NO: 650 - protein, 642 aa, Homo sapiens
MVHGSVTFRDVAIDFSQEEWECLQPDQRTLYRDVMLENYSHLISLAGSSISKPDVITLLEQEKEPWMVVRKETSRRYPDLELKYGPEKVSPENDTSEVNLPKQVIKQISTTLGIEAFYFRNDSEYRQFEGLQGYQEGNINQKMISYEKLPTHTPHASLICNTHKPYECKECGKYFSRSANLIQHQSIHTGEKPFECKECGKAFRLHIQFTRHQKFHTGEKPFECNECGKAFSLLTLLNRHKNIHTGEKLFECKECGKSFNRSSNLVQHQSIHSGVKPYECKECGKGFNRGAHLIQHQKIHSNEKPFVCKECGMAFRYHYQLIEHCQIHTGEKPFECKECGKAFTLLTKLVRHQKIHTGEKPFECRECGKAFSLLNQLNRHKNIHTGEKPFECKECGKSFNRSSNLVQHQSIHAGIKPYECKECGKGFNRGAHLIQHQKIHSNEKPFVCRECEMAFRYHCQLIEHSRIHTGDKPFECQDCGKAFNRGSSLVQHQSIHTGEKPYECKECGKAFRLYLQLSQHQKTHTGEKPFECKECGKFFRRGSNLNQHRSIHTGKKPFECKECGKAFRLHMHLIRHQKLHTGEKPFECKECGKAFRLHMQLIRHQKLHTGEKPFECKECGKVFSLPTQLNRHKNIHTGEKAS

SEQ ID NO: 651 - DNA, 2121 bp, Homo sapiens
  CDS (542)..(1321)
ccaataggcagagccctaggacctgcccacgtctggttcaggggctagaaaagagcgtcgatgccggcggcagtgatgagtcctaggaggcgctggctctttggcggctcggaggagcggctgctgctgctgctgctgctgctggtggcccctttgcagaaaagttctaagaacagtgctgttggctcagtgagatgaggttatcggaaaactttctgtttacacaagagttgcctccttcaaagaagcatgcatggtccttgcaggtcactgtgcccatcactctgcatagtccagctgcactctgcttcacacagctgcctgcccattgcaggcatttgagtttgcaatccatgccttaaactttaaatcacactggctacagcgttgtgtgtttcttggtaaacactgggtaaatcagctcctgtggatgttgactgaagtttctatgtttgcaagctaatcctcagcagtttctttatgtattgctgtccttgaatattagcccatttgaaaacgcctgggaagttcagccatcagtatgtccaagtacaaacttattatgttaagacatggagagggtgcttggaataaggagaaccgtttttgtagctgggtggatcagaaactcaacagcgaaggaatggaggaagctcggaactgtgggaagcaactcaaagcgttaaactttgagtttgatcttgtattcacatctgtccttaatcggtccattcacacagcctggctgatcctggaagagctaggccaggaatgggtgcctgtggaaagctcctggcgtctaaatgagcgtcactatggggccttgatcggtctcaacagggagcagatggctttgaatcatggtgaagaacaagtgaggctctggagaagaagctacaatgtaaccccgcctcccattgaggagtctcatccttactaccaagaaatctacaacgaccggaggtataaagtatgcgatgtgcccttggatcaactgccacggtcggaaagcttaaaggatgttctggagagactccttccctattggaatgaaaggattgctcccgaagtattacgtggcaaaaccattctgatatctgctcatggaaatagcagtagggcactcctaaaacacctggaaggtatctcagatgaagacatcatcaacattactcttcctactggagtccccattcttctggaattggatgaaaacctgcgtgctgttgggcctcatcagttcctgggtgaccaagaggcgatccaagcagccattaagaaagtagaagatcaaggaaaagtgaaacaagctaaaaaatagtctttctcaactgttggctaagaagaaatgcaaaagaagtggcataggagtgtgttatgggtgctgaactctctctctttttccccgattttccagagctaggctgtggagtagagtttgtataggtaactaggtaacttattgtggcccagataaggctttaggatgcctcagtgcttatgtcatagccttatgagttagctttcttgctagccccctagtcggtcaccaaactagtaactagtggggcttaatgaaggtcataagtttctgagatgggagagcaacaagtagagatgaagttaaaggtatttatcattcaagaaatcattattgagtcaccattgacaggcactattctaatcagtagttcactttaatatttaataagattttctgggataacagtaagggatattagataatataccgtatgtatttattactagtcttttcctctaggaaaagggatactttgataattaaggccagaggcccattagttgagaaagtcacagatatatttctccaagaaagccaacaaccaccaccacaatgacagaaatgacaacaaggccctttaacttgtcttctagtttagagacatccttcatttgacatttagtagaattcctctttggccacaagaataagcagcaaataaacaactatggctgttgaggttctcattttggtttgttttaattttttgaactttgggtacctgtaattagtttaaaaataaagttcctgataataaagtgactgaaaatggcatccccaaaaaaaaaaaaaaaaaa

SEQ ID NO: 652 - protein, 259 aa, Homo sapiens
MSKYKLIMLRHGEGAWNKENRFCSWVDQKLNSEGMEEARNCGKQLKALNFEFDLVFTSVLNRSIHTAWLILEELGQEWVPVESSWRLNERHYGALIGLNREQMALNHGEEQVRLWRRSYNVTPPPIEESHPYYQEIYNDRRYKVCDVPLDQLPRSESLKDVLERLLPYWNERIAPEVLRGKTILISAHGNSSRALLKHLEGISDEDIINITLPTGVPILLELDENLRAVGPHQFLGDQEAIQAAIKKVEDQGKVKQAKK

SEQ ID NO: 653 - DNA, 4490 bp, Homo sapiens
  CDS (375)..(989)
cccgcagtcgcgcaagcgcgagcggctgtgcgcggtgcgtggtgcgtggtgcgtgatacgagcggcggcacgtggcgcgggtgcggggcgtggagtggcgtggcgtggagtggcgtggcgtggcggggtctcgcggcgcgggcgcgcacccggagctgtggacggagagtgcctccctctggcctcagtttcctcatgttgtagtagcggagcatggcccggaccgggcccccgagaccgccccgtgcaacctcaccgccagcctgggggcctcagcgactgggacgggaccaaggggctcggggattctccctgcccccggccctggtgcgtgactgaccctcctgttcccagagcccccagcgcaggccgggatgttcgtcctggtggaaatggtggacaccgtccggatccccccttggcagtttgagaggaagctcaacgactccattgccgaggagctgaacaagaagttggccaacaaggtcgtgtacaacgtgggactctgcatttgtctgtttgatatcaccaaactggaggatgcctatgtattccctggggatggcgcatcacacaccaaagtccattttcgctgcgtggtgtttcatccattcctagatgagattctcattgggaagatcaaaggctgcagcccagaaggagtgcacgtctctctaggcttcttcgatgacattctcatccccccagagtcactgcagcagccagccaagttcgacgaagcggagcaggtgtgggtgtgggagtacgagacggaggaaggagcacacgacctctacatggacaccggcgaggagatccgcttccgggtggtggacgagagctttgttgacacgtcccccacagggcccagctcagcagatgccaccacttccagtgaggagctgccaaagaaggaggctccgtacacgcttgtgggatccatcagtgagccaggcctgggccttctctcctggtggaccagcaactagccctggggctggacagtggaccctaccagcctgcgggaaggtggtatggccggctgtgaagacaacagcagctgaggccgatgctaaggagatagtgtctcgagctggacagtgaggcaaggccaggagtgcccaccagcttgccccgctcctccaccatctaggccctgctcctccttcactgcagtgatggatccatctgtggctgtggctgttgggcctccactgaccttgactgaaaagacccttcctggaccctggacttgacaacaaacggcacagacaccaatcactcacagaacagtcactggttttggattcttgttttccttgcaagaacaaaaggttctctagaatccttcagccaccaatgaaatgatcaggcaggagaaaaactttagatgggagtcttgtcatcaaaaataaatacagttgcatggagctgcttaagatctgaaccaaactcaaaataggaagacgggggctaaaaagttattttaagaacccccccaccacaaccacagtcactccgtgggctaagcggggagcaggaagcatgtctggtcacaccatcttggaataggaagccatggctggacggatcggatccactgatggcacacgtggagctgaacttgacgccagcggcggggcggggaggcactgccctcactgttgcagttccttcattctgttgagggcactgccagcgcggaaccactcaatctgcgtctcgttgaaggtgtggttcaggaggatggtctcctgggtcccgttggggtgcttgatgatgcacttcaggggctgcaaggagaaggtgggtgtgggtggaagtggtgggtactgtgtgcccttggccccgcaggggggtcagggagacagggcactgcctggggacctaagaggtcagcaggcaaaccaaatcctaggccagtctgtgcctgatggcccaggtcagacccaggtggcacctacaggggattcctggggcccagagggtcctgcagtgggtgggctgtcccctgagtgccaggtcctggtgagtaaagggaggttggggaggtgtgagggccccgggttgactccaacccccaactctgagaagccactttgctttctctgtggggccacctggagaactgggggcctttccagctggaatgaagcctcctgggagaagctaccctggggccagtgcaggaggggaaacaaggtggctgcccctcaccccaccacctcagggggacccgggcccctaaccttgccaggggtgaagtccttcaggccctgaatggtcagcttgtccacagggtgaatcttgttgtagtcagccgggtcagcgaaggtcagaggcagcaggccctgtttcttcaggttggtctctggaaagcaggcggcattcggtcatcgggggcctgactagcctggagagcttcattttctgaacccatctggggctctgggagatgcccctaatcctgctgcctgggacaatgcccgggcagtgactatggggccctggtctgctccctttcactaggggtgcccctagcaagtgtgcgctggtgctgaggtctgcgaggccttcctgctgcacattcatgatcagaaagaaccccctggcacatgtcctagatctcagcggctcagatctacaagcctggaagcagggcctgcgggaagccgggaagctgagcgtcggatgtgcactgtgtgagcctaagaaggggcaagaggctgacgggcctgtgggctgcagtggacacagcctagaaccaggcccaactcagccacgggcagggagagtgaccttgatcactagggatgggatgaggatggcctgggtacagactccagctcaccgtggatcctggcaaagctcttggtgatgatggcccggcccccaaggtggcgaggctccagagctgcatgctcccggctcgagccctcgccgtagttctcgtctccgatcaccacccacctgatgccatgtttctgtcaggcaagcgggggtaaggttataaggcagaggagggcaccgtcctcacctgtctggccctacctgcctggcctcacccacctggcgcctgggcatcctgaggctcccggtaaaggggctggaggggcccttcctcgcctgctgcctaagggcaagtgaagcctgcgtgaatgagacccaaacgaggccccgaggggacagaggcacgtggttgtttgcagtggcaaagaagacagaagccacccattggtgcttggcagaggcaggtgtgtgtggagggaggttgggtgagacagggacggcctccgggccccacacaagatgcatctgtgaagctcaaggcgcccccttcctgggagcaccctctgccccacccagccaccagggggtgccagagtcctttcacccggctgggccaggacttgggttcagccctggttctgtttgtttctcaaagcagaaaaagtccaatcacctcagaccctctctgcctgctcactgtgaggccccgtgtagccccctctctgagcttttggcctctgacttcctgagtcggcccccttccttgtctttgtctagggccagatatcctaagatatctctcactaactcctcctggtgcagggacccggctgtaccaccggacctgggcctcatgccttctcagccacagggaggggctgcaggcctctcctcccttccacagcagtcccctttgggcttggtcggcctccttcccagtttccactcccctaatgtcctccctgcacctgccttgcaggccccttcaggagtgaccactggcattgcccctatcaactctgacccaccttgtagtagcgggcagtgtcagggacggggccaaactcctgagtgacggcattgcgcacggagttggccttgccgttttcaatgttgatggcaccaatgagcaggttgttggagatgttatccaagtgcccacggaacttgagccaggggccagcagctgagatgtggtcagtggtacacttccctttgaccttgggtggtaagtagagaggacagaggtcagggcatggccctggaggggtggatgacaagccctccagaggcaggcagcaggccccggggcccaggaggggtgacagaggggtgagaggcaggcaagtcttcagacacgtgttctgtggtcctggtgcttccaccctaaggccacatgggctcaggccaggccttcatcccctcaaaggcctctggctgctcagtctcccttatggggcagaggccgcccaaagttgggacaggtcaatgttcgctcacccttcaggcctcagctgcaagatcagccacagacctcatgctggacacaggagcccaggacatgcctgggtcctggctgatgactgattagtctcttctgtcacaggggtgcctggagaccccttaataagcagcataaataaatatctgacacagattggaggcctctggccacaccaaaaaaaaaaaaaaaaaaaaaa

SEQ ID NO: 654 - protein, 204 aa, Homo sapiens
MFVLVEMVDTVRIPPWQFERKLNDSIAEELNKKLANKVVYNVGLCICLFDITKLEDAYVFPGDGASHTKVHFRCVVFHPFLDEILIGKIKGCSPEGVHVSLGFFDDILIPPESLQQPAKFDEAEQVWVWEYETEEGAHDLYMDTGEEIRFRVVDESFVDTSPTGPSSADATTSSEELPKKEAPYTLVGSISEPGLGLLSWWTSN

SEQ ID NO: 655 - DNA, 960 bp, Homo sapiens
  CDS (631)..(960)
ggctgctcctccatgttccgccaccagggtgccatttccctgatgatgagccaagagggacatgtgaggaggagggggccgggaccatctgccttgccgccccaccccttctctgtggccatacccaggggcttctcaaaacggtcacagcagcctcccttaaagctgggcatggggcgtatggtgacctacacctgcaagagcaagaaggcctggcggagaggtgaagtcagttctgcccatagcaagccaggaggtgttgggcaacctgcctgagaaggaggggaaggagccagcaggggacgcctctgggaaaacaggggcctcagacagcagccactttatccagatcctgcagttgaaggaagaatacctgcagagagccacagggccccgtgaggtcagccctgagccctccaccagggagaaggagtgtctgcttgaaggcctggaccaccccacttgctgccagcctgtcagtgaccaccacccattcacaggagactgcgtgttggcctcttccagggtggaggcaactccttggaaccacttccacagtttggacaaggagcttcaaaactcggccatggccaaggtttgcccagcgaggagaaaagtgaggaagagaaaatgaaggaagaggacagctcattcaagctctgtgtcccaggcattgttgccctccagtcgccaccgaacaaggctttcagatccacagacacagtgggtttcctggagtcggagttgaagaagcttctgggaatgcagcaagagtcccgcctctggaagctaggcagccaagagggccgagagctgcttacccggccagagatcaccgtggtggagggagaaggttatgaggtgcagagaagactgaggcatcttccttcacccatttctgtcgcccagtgcctgcttcttgaggagaaaggtgagatgggaaactggcctccagagtga

SEQ ID NO: 656 - protein, 109 aa, Homo sapiens
MKEEDSSFKLCVPGIVALQSPPNKAFRSTDTVGFLESELKKLLGMQQESRLWKLGSQEGRELLTRPEITVVEGEGYEVQRRLRHLPSPISVAQCLLLEEKGEMGNWPPE

SEQ ID NO: 657 - DNA, 3639 bp, Homo sapiens
  CDS (134)..(3505)
gcggcgctgggtcggtggcggaggctgaggagaaggaggagcgggccgtggaggcttcgccgcctaggtactgctataaccagaatttggtagaaaaaggatttacttgttggggccctcttgataaaaagagatgtggggggattctcgacctgctaacagaactggaccttttcgtgggagccaagaagaaaggtttgctcccgggtggaacagggattatcctcctcctccccttaagagtcatgctcaagagagacactctggcaactttcctggcagagattcacttccctttgatttccaggggcattcggggcctccttttgcaaatgtagaggagcattctttcagctatggagctagagacggaccgcatggtgactatcgaggaggggagggacctggacatgatttcagggggggagatttttcgtcttctgatttccagagcagagattcatcacagttggacttcaggggtagggacatacattctggggattttcgggatagagaaggaccacctatggactataggggtggagatggtacttctatggattatagaggtagggaggcacctcatatgaactacagagacagggatgctcacgctgttgacttcagaggtagggatgctcctccatctgacttcaggggccggggcacttatgatttagattttagaggccgggatggatcccatgcagattttaggggaagggatttatcagatttggattttagggccagagaacagtcccgttctgattttaggaatagagatgtatctgatttggactttagagacaaagacggaacacaagtagactttagaggccgaggttcaggtactactgatctagactttagggacagggatacgccacattcagatttcagaggtagacaccgatctaggactgatcaggattttaggggcagagagatgggatcttgtatggaatttaaagatagggagatgccccctgtggatccaaatattttggattacattcagccctctacacaagatagagaacattctggtatgaatgtgaacaggagagaagaatccacacatgaccatacgatagaaaggcctgcttttggcattcagaagggagaatttgagcattcagaaacaagagaaggagaaacacaaggtgtagcctttgaacatgagtctccagcagactttcagaacagccaaagtccagttcaagaccaagataagtcacagctttctggacgtgaagagcagagttcagatgctggtctgtttaaagaagaaggcggtctggactttcttgggcggcaagacaccgattacagaagcatggagtaccgtgatgtggatcataggctgccaggaagccagatgtttggctatggccagagcaagtcttttccagagggcaaaactgcccgagatgcccaacgggaccttcaggatcaagattataggaccggcccaagtgaggagaaacccagcaggcttattcgattaagtggggtacctgaagatgccacaaaagaagagattcttaatgcttttcggactcctgatggcatgcctgtaaagaacttgcagttgaaggagtataacacaggttacgactatggctatgtctgcgtggagttttcactcttggaagatgccatcggatgcatggaggccaaccagggaactctaatgatccaggacaaagaagttaccctggagtatgtatcaagcctggatttttggtactgcaaacgatgtaaggcaaacattggtgggcaccgatcttcctgttcattctgcaagaacccaagagaagtgacagaggccaagcaagaattaataacctaccctcagcctcagaaaacatccataccagcaccattggaaaaacagcccaaccagcccctaagaccagctgataaggaacctgaacccaggaagagggaagaaggccaagagtcacgcttaggacatcaaaagagagaagcagaaaggtatctgcctccttctcgaagggaagggccaactttccgaagagaccgagagagggagtcatggtctggagagacacgccaggatggagagagcaaaactatcatgctaaagcgtatctatcgttccacaccacctgaggtgatagtggaagtgctggagccctatgtccgccttactactgccaacgtccgtatcatcaagaacagaacaggccctatggggcatacctatggctttattgacctcgactcccatgcggaagctcttcgtgtggtgaagatcttacagaaccttgatccgccatttagcattgatgggaagatggtagctgtaaacctggccactggaaaacgaagaaatgattctggggaccattctgaccacatgcattactatcagggtaaaaaatatttccgagataggaggggaggtggcagaaattcagactggtcttcagatacaaatcgacaaggacaacagtcatcatctgactgctacatatatgattctgctactggctactattatgaccccttggcaggaacttattatgaccccaatacccagcaagaagtctatgtgccccaggatcctggattacctgaggaagaagagatcaaggaaaaaaaacccaccagtcaaggaaagtcaagtagcaagaaggaaatgtctaaaagagatggcaaggagaaaaaagacagaggagtgacgaggtttcaggaaaatgccagtgaagggaaggcccctgcagaagacgtctttaagaagcccctgcctcctactgtgaagaaggaagagagtccccctccacctaaagtggtaaacccactgatcggcctcttgggtgaatatggaggagacagtgactatgaggaggaagaagaggaggaacagacccctcccccacagccccgcacagcacagccccagaagcgagaggagcaaaccaagaaggagaatgaagaagacaaactcactgactggaataaactggcttgtctgctttgcagaaggcagtttcccaataaagaagttctgatcaaacaccagcagctgtcagacctgcacaagcaaaacctggaaatccaccggaagataaaacagtctgagcaggagctagcctatctggaaaggagagaacgagagggaaagtttaaaggaagaggaaatgatcgcagggaaaagctccagtcttttgactctccagaaaggaaacggattaagtactccagggaaactgacagtgatcgtaaacttgttgataaagaagatatcgacactagcagcaaaggaggctgtgtccaacaggctactggctggaggaaagggacaggcctgggatatggccatcctggattggcttcatcagaggaggctgaaggccggatgaggggccccagtgttggagcctcaggaagaaccagcaaaagacagtccaacgagacttatcgagatgctgttcgaagagtcatgtttgctcgatataaagaactcgattaagaaaggagacaagttccatgggatacaacctccctcttgttttgtttgtctctccttttcttttgttactgttcttgctgctagaacttttttaaataaactttttttcaatgtgaaaaaaaaaaaaaaaaaaa

SEQ ID NO: 658 - protein, 1123 aa, Homo sapiens
MWGDSRPANRTGPFRGSQEERFAPGWNRDYPPPPLKSHAQERHSGNFPGRDSLPFDFQGHSGPPFANVEEHSFSYGARDGPHGDYRGGEGPGHDFRGGDFSSSDFQSRDSSQLDFRGRDIHSGDFRDREGPPMDYRGGDGTSMDYRGREAPHMNYRDRDAHAVDFRGRDAPPSDFRGRGTYDLDFRGRDGSHADFRGRDLSDLDFRAREQSRSDFRNRDVSDLDFRDKDGTQVDFRGRGSGTTDLDFRDRDTPHSDFRGRHRSRTDQDFRGREMGSCMEFKDREMPPVDPNILDYIQPSTQDREHSGMNVNRREESTHDHTIERPAFGIQKGEFEHSETREGETQGVAFEHESPADFQNSQSPVQDQDKSQLSGREEQSSDAGLFKEEGGLDFLGRQDTDYRSMEYRDVDHRLPGSQMFGYGQSKSFPEGKTARDAQRDLQDQDYRTGPSEEKPSRLIRLSGVPEDATKEEILNAFRTPDGMPVKNLQLKEYNTGYDYGYVCVEFSLLEDAIGCMEANQGTLMIQDKEVTLEYVSSLDFWYCKRCKANIGGHRSSCSFCKNPREVTEAKQELITYPQPQKTSIPAPLEKQPNQPLRPADKEPEPRKREEGQESRLGHQKREAERYLPPSRREGPTFRRDRERESWSGETRQDGESKTIMLKRIYRSTPPEVIVEVLEPYVRLTTANVRIIKNRTGPMGHTYGFIDLDSHAEALRVVKILQNLDPPFSIDGKMVAVNLATGKRRNDSGDHSDHMHYYQGKKYFRDRRGGGRNSDWSSDTNRQGQQSSSDCYIYDSATGYYYDPLAGTYYDPNTQQEVYVPQDPGLPEEEEIKEKKPTSQGKSSSKKEMSKRDGKEKKDRGVTRFQENASEGKAPAEDVFKKPLPPTVKKEESPPPPKVVNPLIGLLGEYGGDSDYEEEEEEEQTPPPQPRTAQPQKREEQTKKENEEDKLTDWNKLACLLCRRQFPNKEVLIKHQQLSDLHKQNLEIHRKIKQSEQELAYLERREREGKFKGRGNDRREKLQSFDSPERKRIKYSRETDSDRKLVDKEDIDTSSKGGCVQQATGWRKGTGLGYGHPGLASSEEAEGRMRGPSVGASGRTSKRQSNETYRDAVRRVMFARYKELD

SEQ ID NO: 659 - DNA, 826 bp, Homo sapiens
  CDS (172)..(669)
tcatgtgacaaagcgcaggacccctcactgccccaactgcttgctgttctctctttcttgggctctaaggacccaggagtctgggtgcacagcctccttctctctgagattcaagagtctgatcagcagcctcttcctcctccaggacccagaagccctgagcttatccccatggagctctgccggtccctggccctgctggggggctccctgggcctgatgttctgcctgattgctttgagcaccgatttctggtttgaggctgtgggtcccacccactcagctcactcgggcctctggccaacagggcatggggacatcatatcaggctacatccacgtgacgcagaccttcagcattatggctgttctgtgggccctggtgtccgtgagcttcctggtcctgtcctgcttcccctcactgttccccccaggccacggcccgcttgtctcaaccaccgcagcctttgctgcagccatctccatggtggtggccatggcggtgtacaccagcgagcggtgggaccagcctccacacccccagatccagaccttcttctcctggtccttctacctgggctgggtctcagctatcctcttgctctgtacaggtgccctgagcctgggtgctcactgtggcggtccccgtcctggctatgaaaccttgtgagcagaaggcaagagcggcaagatgagttttgagcgttgtattccaaaggcctcatctggagcctcgggaaagtctggtcccacatctgcccgcccttccagcccttccccagcccctcctcttgtttcttcattcattcaacaaaatttggctggaa

SEQ ID NO: 660 - protein, 165 aa, Homo sapiens
MELCRSLALLGGSLGLMFCLIALSTDFWFEAVGPTHSAHSGLWPTGHGDIISGYIHVTQTFSIMAVLWALVSVSFLVLSCFPSLFPPGHGPLVSTTAAFAAAISMVVAMAVYTSERWDQPPHPQIQTFFSWSFYLGWVSAILLLCTGALSLGAHCGGPRPGYETL

SEQ ID NO: 661 - DNA, 745 bp, Homo sapiens
  CDS (74)..(580)
gtcgggtacgggaaggtccaagccgctgccgggtgcccgagggccgtcgtggccgccgtcgccacgggtcccaatggagccgccgaatctctatccggtgaagctctacgtgtacgacctgtccaaaggcctggcccggcggctcagccccatcatgctggggaaacaactggaaggcatctggcacacatccatagttgtgcacaaggatgagttcttcttcggcagtggtggtatctccagctgccccccgggagggacattgcttgggcctccagactctgtggttgatgtggggagtacagaagtcacagaagaaatctttctggagtacctctcctccctgggggagtccctgttccgaggtgaggcctacaacctctttgaacacaattgtaacaccttcagcaacgaagtggcacagttcctgactgggcggaagattccttcttacatcacagacctgccctctgaagttctctccacgccctttggacaggcacttcggcccctcctggactccattcagatccagcctccaggagggagctccgtgggcagacccaacggccagagctaacaggactgcctgggaccgccctgcctcaccagggcttttcctttttaaacaaaacaaaccctaccagatttctattttataattttacatcagagctaacaaccaggggacggctttttaaatttcccagggaaggagaccgtcaggccgcatgtagacaatgct

SEQ ID NO: 662 - protein, 168 aa, Homo sapiens
MEPPNLYPVKLYVYDLSKGLARRLSPIMLGKQLEGIWHTSIVVHKDEFFFGSGGISSCPPGGTLLGPPDSVVDVGSTEVTEEIFLEYLSSLGESLFRGEAYNLFEHNCNTFSNEVAQFLTGRKIPSYITDLPSEVLSTPFGQALRPLLDSIQIQPPGGSSVGRPNGQS

SEQ ID NO: 663 - DNA, 526 bp, Homo sapiens
  CDS (55)..(408)
tggttcctgccgtccggactctttttcctctactgagattcatctgtgtgaaatatgagttggcgaggaagatcgacctattattggcctagaccaaggcgctatgtacagcctcctgaaatgattgggcctatgcggcccgagcagttcagtgatgaagtggaaccagcaacacctgaagaaggggaaccagcaactcaacgtcaggatcctgcagctgctcaggagggagaggatgagggagcatctgcaggtcaagggccgaagcctgaagctcatagccaggaacagggtcacccacagactgggtgtgagtgtgaagatggtcctgatgggcaggagatggacccgccaaatccagaggaggtgaaaacgcctgaagaaggtgaaaagcaatcacagtgttaaaagaaggcacgttgaaatgatgcaggctgctcctatgttggaaatttgttcattaaaattctcccaataaagctttacagccttctgcaaagaaaaaaaaaaaaaaaaaaaaaaaaaa

SEQ ID NO: 664 - protein, 117 aa, Homo sapiens
MSWRGRSTYYWPRPRRYVQPPEMIGPMRPEQFSDEVEPATPEEGEPATQRQDPAAAQEGEDEGASAGQGPKPEAHSQEQGHPQTGCECEDGPDGQEMDPPNPEEVKTPEEGEKQSQC

SEQ ID NO: 665 - DNA, 2622 bp, Homo sapiens
  CDS (34)..(2145)
aaccgtctcctggttggggggtgggggggaaagatggcggagctgatgctgctcagcgagattgctgacccgacgcgtttcttcaccgacaacctgcttagcccggaggactggggtctgcagaacagcaccttgtattctggcctagatgaagtggccgaggagcagacgcagctcttccgttgcccggagcaggatgtcccgtttgacggcagctccctggacgtggggatggatgtcagcccctctgagcccccatgggaactcctgccgatcttcccagatcttcaggtgaagtctgagccatcttccccctgctcttcctcctccctcagctccgagtcatcgcgtctctccacagagccatccagcgaggctcttggggtaggggaggtgctccatgtgaagacagagtccttggcacccccactgtgtctcctgggagatgacccaacatcctcatttgaaaccgtccagatcaacgttatccccacctctgatgattcctcagatgtccagaccaagatagaacctgtctctccatgttcttccgtcaactctgaggcctccctgctctcagccgactcctccagccaggcttttataggagaggaggtcctggaagtgaagacagagtccctgtccccttcaggatgcctcctgtgggatgtcccagccccctcacttggagctgtccagatcagcatgggcccatcccttgatggctcctcaggcaaagccctgcccacccggaagccgccactgcagcccaaacctgtagtgctaaccactgtcccaatgccatccagagctgtgcctcccagcaccacagtccttctgcagtccctcgtccagccacccccagtgtccccagttgtcctcatccagggtgctattcgagtccagcctgaagggccggctccctctctaccacggcctgagaggaagagcatcgttcccgctcctatgcctggaaactcctgcccgcctgaagtggatgcaaagctgctgaagcggcagcagcgaatgatcaagaaccgggagtcagcctgccagtcccggagaaagaagaaagagtatctgcagggactggaggctcggctgcaagcagtactggctgacaaccagcagctccgccgagagaatgctgccctccggcggcggctggaggccctgctggctgaaaacagcgagctcaagttagggtctggaaacaggaaggtggtctgcatcatggtcttccttctcttcattgccttcaactttggacctgtcagcatcagtgagcctccttcagctcccatctctcctcggatgaacaagggggagcctcaaccccggagacacttgctggggttctcagagcaagagccagttcagggagttgaacctctccaggggtcctcccagggccctaaggagccccagcccagccccacagaccagcccagtttcagcaacctgacagccttccctgggggcgccaaggagctactactaagagacctagaccagctcttcctctcctctgattgccggcacttcaaccgcactgagtccctgaggcttgctgacgagttgagtggctgggtccagcgccaccagagaggccggaggaagatccctcagagggcccaggagagacagaagtctcagccacggaagaagtcacctccagttaaggcagtccccatccaaccccctggacccccagaaagggattctgtgggccagctgcaactatatcgccacccagaccgttcgcagccagcattcttggatgcaattgaccgacgggaagacacattttatgttgtctctttccgaagggaccacctgctgctcccagccatcagccacaacaagacctcccggcccaagatgtccctggtgatgcctgccatggcccccaatgagaccctgtcaggccgtggggccccgggggactatgaggagatgatgcagatcgagtgtgaggtcatggacaccagggtgattcacatcaagacctccacagtgcccccctcgctccgaaaacagccatccccaaccccaggcaatgccacaggtggccccttgccagtctctgcagccagccaggcccaccaggcctcccaccagcccctctacctcaatcatccctgacctctgccattcacactgacttagaacggggggagggggtaccaggtggccaggtgggactgtttcaaatttccctgatccccaggcttggggcaattggtaaaggaaagagcaggtgtgggggttaagcacttatttgaggtgggggtgttcacctctcttctcatcccttttcagaatatagggctcctctcattcctgtgaacccccagtcctggcttctttgtttgaggggattgtgtgaggttcagttgtggggtgggtggtgagctgctgcatattttttattttgtttctctagtgttatggcagtggaggtgggaatttagtccccaggtgggacaagggaagttttttcattttggagctagttactgggagtaagggagggtggggtgggggggagttcaggtttatgtgtgtgcatttcttttttattattattaaataaacaacttggagggagttgaaaaaaaa

SEQ ID NO: 666 - protein, 703 aa, Homo sapiens
MAELMLLSEIADPTRFFTDNLLSPEDWGLQNSTLYSGLDEVAEEQTQLFRCPEQDVPFDGSSLDVGMDVSPSEPPWELLPIFPDLQVKSEPSSPCSSSSLSSESSRLSTEPSSEALGVGEVLHVKTESLAPPLCLLGDDPTSSFETVQINVIPTSDDSSDVQTKIEPVSPCSSVNSEASLLSADSSSQAFIGEEVLEVKTESLSPSGCLLWDVPAPSLGAVQISMGPSLDGSSGKALPTRKPPLQPKPVVLTTVPMPSRAVPPSTTVLLQSLVQPPPVSPVVLIQGAIRVQPEGPAPSLPRPERKSIVPAPMPGNSCPPEVDAKLLKRQQRMIKNRESACQSRRKKKEYLQGLEARLQAVLADNQQLRRENAALRRRLEALLAENSELKLGSGNRKVVCIMVFLLFIAFNFGPVSISEPPSAPISPRMNKGEPQPRRHLLGFSEQEPVQGVEPLQGSSQGPKEPQPSPTDQPSFSNLTAFPGGAKELLLRDLDQLFLSSDCRHFNRTESLRLADELSGWVQRHQRGRRKIPQRAQERQKSQPRKKSPPVKAVPIQPPGPPERDSVGQLQLYRHPDRSQPAFLDAIDRREDTFYVVSFRRDHLLLPAISHNKTSRPKMSLVMPAMAPNETLSGRGAPGDYEEMMQIECEVMDTRVIHIKTSTVPPSLRKQPSPTPGNATGGPLPVSAASQAHQASHQPLYLNHP

SEQ ID NO: 667 - DNA, 6358 bp, Homo sapiens
  CDS (2)..(2233)
aatgattgaagatagtgggaaaagaggaaataccatggcagaaagaagacagctgtttgcagagatgagggctcaagatctggatcgcatccgactctccacctacagaacagcatgcaagcttaggtttgttcagaagaaatgcaatttgcacctggtggacatatggaatgtcatagaagcattgcgggaaaatgctctgaacaacctggacccaaacactgaactcaacgtgtcccgcttagaggctgtgctctccactattttttaccagctcaacaaacggatgccaaccactcaccaaatccatgtggagcagtccatcagcctcctccttaacttcctgcttgcagcgtttgatccggaaggccatggtaaaatttcagtatttgctgtcaaaatggctttagccacattgtgtggagggaagatcatggacaaattaagatatattttctcaatgatttctgactccagtggggtgatggtttatggacgatatgaccaattccttcgggaagttctcaaactacccacggcagtttttgaaggtccttcatttggttacacagaacagtcagccagatcctgtttctcccaacagaaaaaagtcacgttaaatggtttcttggacacgcttatgtcagatcctcccccgcagtgtctggtctggttgcctcttctgcatcgactagcaaatgtggaaaatgtcttccatccggttgagtgttcctactgccacagtgagagtatgatgggatttcgctaccgatgccaacagtgtcacaattaccagctctgtcaggactgcttctggaggggacatgccggtggttctcatagcaaccagcaccaaatgaaagagtacacgtcatggaaatcacctgctaagaagctgactaatgcattaagcaagtccctgagctgtgcttccagccgtgaacctttgcaccccatgttcccagatcagcctgagaagccactcaacttggctcacatcgttgatacttggcctcccagacctgtaaccagcatgaacgacaccctgttctcccactctgttccctcctcaggaagtccttttattaccaggagctctcctcccaaggacagtgaagtagagcagaacaaactgctggctagggctgctccagcttttctgaagggcaaagggatacagtacagcctgaatgtggcagacaggctagctgatgaacatgttctcatcgggttgtatgtcaacatgctccggaacaacccctcatgcatgcttgagagttcaaaccggcttgatgaagaacacaggctaattgccaggtatgcggcaaggctggcagcagagtcctcttcgtctcagccacctcagcagagaagtgctcctgacatctctttcaccatcgatgcgaataagcagcaaaggcagctgattgctgagctagaaaacaagaacagagaaatcttacaggagatccagagacttcggctagagcatgaacaagcttctcagcccacgccagagaaggcacagcaaaaccccaccctgctggcagaactccggctcctcagacagcgcaaagatgagctggaacagagaatgtctgctctccaggagagccggagagagctaatggtccagttggagggtctcatgaagctactaaagactcagggggcaggctctccccgctcctcccccagccacaccatcagcaggccaattcccatgcccatccggtcagcgtcagcctgctccaccccgacgcacacgccgcaggactccctcacaggagtagggggagatgtacaagaggcatttgcacaaagttcaagaagaaacttaaggaatgacttgctagtggctgcagattccatcactaacactatgtcctctcttgtgaaagagctgaattctgaggttgggagtgaaacagagagtaatgtggattctgaatttgcacggactcagtttgaggatcttgttccctcaccaacctctgaaaaggcttttctagcgcaaatccatgcccgaaaacctgggtacattcacagtggagctaccacaagtaccatgcgtggcgacatggttacggaggatgcagatccctatgtgcagcctgaagatgaaaactatgaaaatgactctgtccggcagctggagaatgagctccagatggaggaatacctgaaacagaagctgcaagatgaagcttatcaggtcagcttgcaaggttgaatgcaatatccttttatcacactcctctcaagcaagctatagtcagacagatgatgaaagtaacatgaaaactggtgatgatggagagccctgtggccacacagaggaggaagacagcagcctggcagcagcctcaccgaagagaggaaccaccacacccagcagctcctgacagacccccacccctaaagatgtgtcctgatgactatagtgcagctaactttttgttctcagatttgtagtgcataggtgtgtgtttcaagaaggaaaaaaaaagacttctgttcaaagttaacttatcagctacatcctctgtaacgtggttcatccctggttaaaaagcaaacaaacacaggctgaaaacccatgctgctgttatacacaatggcagtattaacaagcattttaaacctttgcacatgatattgaacctgttcagtttacaatgacaatattaatactgtttatagctagaagtttgatttctgaattctttgagattttagcaaaacagtttattatacactgtacatttttttcacagcaattggaaaaaaacaaccacttgcaatcattcaataaccctgaagaatttggttcctgagtgtacaaactcagagcccggaagccaagaagggtccttggcctgcacggtctgtagttgactccaagtctctgtgagcagtgacttgaaccaaacacaccaggaataatccattctttggggcctctttccaactcgaggttgttttctttcaagatactctaatcagccatagaatttagtgtaaatatttttttttccaaatagatatcatattcaaaaaaggcagcattcaaattatatagaatctagtttttaaaatcagcacagatcttcttaaaaactgtgaactatgttttgaaatactcgttactaaagctgtttataaaccacaggtgccataagatccccaaacggactaaagttatctctgctcttccatggtcttgttcctctcgttttggctttaggaagcatgtctttaacagcaccgctcgttcacaagttcccccatcaagttgtttggaggccttcagctttaaatgtacaggcttaaagtgcgcttgcaaacgtttgctctcctttttttctgaatgttgattgccttagctggccacctggtgttctgcatgtagccttctgtggtcatgtgaaaggagacaggctcttctaagttgagttgggatttttgcactcagtgaaaagctgaagtgcaaaagagctatcaaagacaagaggataaaagactgggatagtcttttccaaggaccctctttagagggccctaaagacctcctttgggaattctggggaaaaagaaaaagtaatcttctacttgcttcaagatttgatttttttaaaaaagcctgcgacctattcaatacattatgcttaaattagcagtttctctggaattcctgtctctcctttaaaagaaaggagagaacattttagaacaatagttctcaaagtgtgttccccggacaagcagcatctgcaacacttaggaaggtcttcgaaatactaatttgtaagccccacctcaggcctactgaatcagaagctctgggggttgggtccagaagtctgttttagtcaaccctctaggtgattctgatgctcgctaaaggttgagaactactgctttagaatgaagtcgtataataaagtctctgaaaaggccttattcagaataagcaagaaaggttctgtgattcacttttgcttctggggctggcaaaaaccttctctgaacccacacaccaagttcgtagttggtaggtgcccagccaagtcctgacatcttcatgccccctctgcagagggcggctgtacgatgttcacatgtctgcgtttggtcagacatcatctccttggctgccctttgaaaccaaatcacttgccttggggataaagtgctcaattggcattagtgagaagcccatcctatcccttgacatacttaatcatatatctctccagagaactcacctgacaaatgtctctgagcacaggctgacaccaaagtggcacaactgcacagttctcagatttctttgcacagattgatttttattgcgggttttgttggggtgtcttaatgttcatctcttttccactgcccatcctctgtgaacccatacctctctagatggagcaggtggccactggtgcctcatactcagtattgaaaaccactacatcccagctacctataatgctgtcagctcaaaatcatagccaggtagttcttgaactcagaacttaaatcctgcacgtggcactccaccactgactggaccgagctggcatatgttgtttctttgtgtttctacatcaaaatgttcgtctaagatttgaactgttctgctgataaccttccccgttgtcatagctatttcattgccaaccaactccatcacatggttgttgatatcgtcatataaagccattgcaaggactctggaaactgccgccaatgaccaatttctgactaaccagccaccttttctctctcttagctccacgtcagcactgagaccagactcgagcacccctgtcctgtaagcgagacaaaatggcgtgtgttattttggggttttgtgttttttggtgggtttctttccttggctctccagatttacttttggggcctgttctaagtgcaaacccagcaagtttcacttgtcctgtccattagatacaactacatcttgcgggggttgtttctttcttgttccacaatgaattgcacatccatctccatcagagctgatagcctgttaataagcactggtctaacacagccaaccctcctccacagcgccatattaatggaggaggggaggaaggtgaaatctactgcatgggattcaggaaacagttgtggttggtcaggacggaagttggggtaagtttggttggtcagagggagttgtgctggagattgtgaaaaatgggttcttgaatgatctactataaggcagggaaggttcatttgtaagtagtaatgtgaactgaattgcattaagagtgtgtggcctttgttgtgatatactatgtattttcttatatgcatgagccaaactgttgcatcataatttagcactgatgtctgcttttattttgatcatctttgtccacccttattagttcttggctgttaaccgtagatagatcttgtaaatccagcaacctttggttgctgcattccccttggttcgattccacgcaaggagccacaagtgagaactccactgtccttagaagaaagggcatttttacttttgaaccaaaaagagaaaaaaaaatcagaagtgttgcatcttgaggcgaattaactgtaagacatttttaattatgactactgcaatttgacaccatttgaaataatcaattcagagacactaaagatttcacaatattcattggtattgtaaaaaaaaaatactattgtatggatttttgtattgctgttaagtattgttttgtgtgtgtgtgtgtgtgtgtgtgttggaacctcctggggacatgttatattttgaagtgattaaactatttaattgtgtgtctatattttggagtggaataatttcttcattaaaaaatgtttttaaaaacactatatcttgggtggtttattcctttgtttcagtgaatctttcctaaagcaacgtggagtcagtctgttgaaagaaggaaggcaggtacttgcagtttaaagcaggacccattgatggaatattgagccaccgaggcaaaatagctcaccttctcttgccttgggggatgcatggtttttaccattctactgttttattagcatctgtgagcatctaatagaaatactattctgctatttatggaaatccttattataattgatatggaagtgagtttgaaattctaacagctaacatatttcatgtttgtatcacacactgttcttaacactttatgtgacttcactcaattctttgaatcctctgcatctagccatgtattctgcaaatattaagtgctcaatggtttttttgttgaattactgaataaatgaattagtggtgaaaaaaaaaaaaaaa

SEQ ID NO: 668 - protein, 743 aa, Homo sapiens
MIEDSGKRGNTMAERRQLFAEMRAQDLDRIRLSTYRTACKLRFVQKKCNLHLVDIWNVIEALRENALNNLDPNTELNVSRLEAVLSTIFYQLNKRMPTTHQIHVEQSISLLLNFLLAAFDPEGHGKISVFAVKMALATLCGGKIMDKLRYIFSMISDSSGVMVYGRYDQFLREVLKLPTAVFEGPSFGYTEQSARSCFSQQKKVTLNGFLDTLMSDPPPQCLVWLPLLHRLANVENVFHPVECSYCHSESMMGFRYRCQQCHNYQLCQDCFWRGHAGGSHSNQHQMKEYTSWKSPAKKLTNALSKSLSCASSREPLHPMFPDQPEKPLNLAHIVDTWPPRPVTSMNDTLFSHSVPSSGSPFITRSSPPKDSEVEQNKLLARAAPAFLKGKGIQYSLNVADRLADEHVLIGLYVNMLRNNPSCMLESSNRLDEEHRLIARYAARLAAESSSSQPPQQRSAPDISFTIDANKQQRQLIAELENKNREILQEIQRLRLEHEQASQPTPEKAQQNPTLLAELRLLRQRKDELEQRMSALQESRRELMVQLEGLMKLLKTQGAGSPRSSPSHTISRPIPMPIRSASACSTPTHTPQDSLTGVGGDVQEAFAQSSRRNLRNDLLVAADSITNTMSSLVKELNSEVGSETESNVDSEFARTQFEDLVPSPTSEKAFLAQIHARKPGYIHSGATTSTMRGDMVTEDADPYVQPEDENYENDSVRQLENELQMEEYLKQKLQDEAYQVSLQG

SEQ ID NO: 669 - DNA, 1844 bp, Homo sapiens
  CDS (187)..(1389)
ggagctactcagaagcgggagtctccgagagaagaaaagcaggtggaaggagaggaagcggatgccgtggggtttacagcaggaaaatccgtggagacagcagatccgagaagcggcgatgtttgcgtagaaccctgtacgtgcttccttcggcctgtcgctcttcccttctctctgaccagcaccatgcttctcctggtgacaagccttctgctctgtgagttaccacacccagcattcctcctgatcccagagaaatcggatctgcgaacagtggcaccagcctctagtctcaatgtgaggtttgactccaggacgatgaatttaagctgggactgccaagaaaacacaaccttcagcaagtgtttcttaactgacaagaagaacagagtcgtggaacccaggctcagtaacaacgaatgttcgtgcacatttcgtgaaatttgtctgcatgaaggagtcacatttgaggttcacgtgaatactagtcaaagaggatttcaacagaaactgctttatccaaattcaggaagggagggtaccgctgctcagaatttctcctgtttcatctacaatgcggatttaatgaactgtacctgggcgaggggtccgacggccccccgtgacgtccagtattttttgtacatacgaaactcaaagagaaggagggagatccggtgtccttattacatacaagactcaggaacccatgtgggatgtcacctggataacctgtcaggattaacgtctcgcaattactttctggttaacggaaccagccgagaaattggcatccaattctttgattcacttttggacacaaagaaaatagaacgattcaaccctcccagcaatgtcaccgtacgttgcaacacgacgcactgcctcgtacggtggaaacagcccaggacctatcagaagctgtcgtacctggactttcagtaccagctggacgtccacagaaagaatacccagcctggcacggaaaacctactgattaatgtttctggtgatttggaaaatagatacaactttccaagctctgagcccagagcaaaacacagtgtgaagatcagagctgcagacgtccgcatcttgaattggagctcctggagtgaagccattgaatttggttctgacgacgggaacctcggctctgtgtacatttatgtgctcctaatcgtgggaacccttgtctgtggcatcgtcctcggcttcctctttaaaaggttccttaggatacagcggctgttcccgccagttccacagatcaaagacaaactgaatgataaccatgaggtggaagacgagatcatctgggaggaattcaccccagaggaagggaaaggctaccgcgaagaggtcttgaccgtgaaggaaattacctgagacccagagggtgtaggaatggcatggacatctccgcctccgcgacacgggggaactgttttcttgatgatgctgtgaacctttatatcattttctatgtttttatttaaaaacatgacatttggggccaggcgcggtggctcacgcctgtaatcccagcactttgggaggccaaggcaggcggatcacctgaggtcaggagttcaagaccagcctgcccaacatggtgaaaccccatctggactaaaaatgcagaaatttacccaggcacggcggcggacgcccatcatcccagctacttgggaggctgaggcaggagaattgcttgaacccgtgaggcggaggttgtagtgagccaagatcgcaccattgcacaccaacctgggtgacagagcaagattgcatctcaaaacaaacaataataataaataataaaaacctgatatttggctggg

SEQ ID NO: 670 - protein, 400 aa, Homo sapiens
MLLLVTSLLLCELPHPAFLLIPEKSDLRTVAPASSLNVRFDSRTMNLSWDCQENTTFSKCFLTDKKNRVVEPRLSNNECSCTFREICLHEGVTFEVHVNTSQRGFQQKLLYPNSGREGTAAQNFSCFIYNADLMNCTWARGPTAPRDVQYFLYIRNSKRRREIRCPYYIQDSGTHVGCHLDNLSGLTSRNYFLVNGTSREIGIQFFDSLLDTKKIERFNPPSNVTVRCNTTHCLVRWKQPRTYQKLSYLDFQYQLDVHRKNTQPGTENLLINVSGDLENRYNFPSSEPRAKHSVKIRAADVRILNWSSWSEAIEFGSDDGNLGSVYIYVLLIVGTLVCGIVLGFLFKRFLRIQRLFPPVPQIKDKLNDNHEVEDEIIWEEFTPEEGKGYREEVLTVKEIT

SEQ ID NO: 671 - DNA, 7544 bp, Homo sapiens
  CDS (56)..(6265)
gcggccgggccgggccgcgggagcaggcggaggcggaggcggcgggggcaggaggatgtcgcagccgccgctgctccccgcctcggcggagactcggaagttcacccgggcgctgagtaagccgggcacggcggccgagctgcggcagagcgtgtctgaggtggtgcgcggctccgtgctcctggcaaagccaaagctaattgagccactcgactatgaaaatgtcatcgtccagaagaagactcagatcctgaacgactgtttacgggagatgctgctcttcccttacgatgactttcagacggccatcctgagacgacagggtcgatacatatgctcaacagtgcctgcgaaggcggaagaggaagcacagagcttgtttgttacagagtgcatcaaaacctataactctgactggcatcttgtgaactataaatatgaagattactcaggagagtttcgacagcttccgaacaaagtggtcaagttggataaacttccagttcatgtctatgaagttgacgaggaggtcgacaaagatgaggatgctgcctcccttggttcccagaagggtgggatcaccaagcatggctggctgtacaaaggcaacatgaacagtgccatcagcgtgaccatgaggtcatttaagagacgatttttccacctgattcaacttggcgatggatcctataatttgaatttttataaagatgaaaagatctccaaagaaccaaaaggatcaatatttctggattcctgtatgggtgtcgttcagaacaacaaagtcaggcgttttgcttttgagctcaagatgcaggacaaaagtagttatctcttggcagcagacagtgaagtggaaatggaagaatggatcacaattctaaataagatcctccagctcaactttgaagctgcaatgcaagaaaagcgaaatggcgactctcacgaagatgatgaacaaagcaaattggaaggttctggttccggtttagatagctacctgccggaacttgccaagagtgcaagagaagcagaaatcaaactgaaaagtgaaagcagagtcaaacttttttatttggacccagatgcccagaagcttgacttctcatcagctgagccagaagtgaagtcatttgaagagaagtttggaaaaaggatccttgtcaagtgcaatgatttatctttcaatttgcaatgctgtgttgccgaaaatgaagaaggacccactacaaatgttgaacctttctttgttactctatccctgtttgacataaaatacaaccggaagatttctgccgatttccacgtagacctgaaccatttctcagtgaggcaaatgctcgccaccacgtccccggcgctgatgaatggcagtgggcagagcccatctgtcctcaagggcatccttcatgaagccgccatgcagtatccgaagcagggaatattttcagtcacttgtcctcatccagatatatttcttgtggccagaattgaaaaagtccttcaggggagcatcacacattgcgctgagccatatatgaaaagttcagactcttctaaggtggcccagaaggtgctgaagaatgccaagcaggcatgccaaagactaggacagtatagaatgccatttgcttgggcagcaaggacattgtttaaggatgcatctggaaatcttgacaaaaatgccagattttctgccatctacaggcaagacagcaataagctatccaatgatgacatgctcaagttacttgcagactttcggaaacctgagaagatggctaagctcccagtgattttaggcaatctagacattacaattgataatgtttcctcagacttccctaattatgttaattcatcatacattcccacaaaacaatttgaaacctgcagtaaaactcccatcacgtttgaagtggaggaatttgtgccctgcataccaaaacacactcagccttacaccatctacaccaatcacctttacgtttatcctaagtacttgaaatacgacagtcagaagtcttttgccaaggctagaaatattgcgatttgcattgaattcaaagattcagatgaggaagactctcagccccttaagtgcatttatggcagacctggtgggccagttttcacaagaagcgcctttgctgcagttttacaccatcaccaaaacccagaattttatgatgagattaaaatagagttgcccactcagctgcatgaaaagcaccacctgttgctcacattcttccatgtcagctgtgacaactcaagtaaaggaagcacgaagaagagggatgtcgttgaaacccaagttggctactcctggcttcccctcctgaaagacggaagggtggtgacaagcgagcagcacatcccggtctcggcgaaccttccttcgggctatcttggctaccaggagcttgggatgggcaggcattatggtccggaaattaaatgggtagatggaggcaagccactgctgaaaatttccactcatctggtttctacagtgtatactcaggatcagcatttacataattttttccagtactgtcagaaaaccgaatctggagcccaagccttaggaaacgaacttgtaaagtaccttaagagtctgcatgcgatggaaggccacgtgatgatcgccttcttgcccactatcctaaaccagctgttccgagtcctcaccagagccacacaggaagaagtcgcggttaacgtgactcgggtcattattcatgtggttgcccagtgccatgaggaaggattggagagccacttgaggtcatatgttaagtacgcgtataaggctgagccatatgttgcctctgaatacaagacagtgcatgaagaactgaccaaatccatgaccacgattctcaagccttctgccgatttcctcaccagcaacaaactactgaagtactcatggtttttctttgatgtactgatcaaatctatggctcagcatttgatagagaactccaaagttaagttgctgcgaaaccagagatttcctgcatcctatcatcatgcagtggaaaccgttgtaaatatgctgatgccacacatcactcagaagtttcgagataatccagaggcatctaagaacgcgaatcatagccttgctgtcttcatcaagagatgtttcaccttcatggacaggggctttgtcttcaagcagatcaacaactacattagctgttttgctcctggagacccaaagaccctctttgaatacaagtttgaatttctccgtgtagtgtgcaaccatgaacattatattccgttgaacttaccaatgccatttggaaaaggcaggattcaaagataccaagacctccagcttgactactcattaacagatgagttctgcagaaaccacttcttggtgggactgttactgagggaggtggggacagccctccaggagttccgggaggtccgtctgatcgccatcagtgtgctcaagaacctgctgataaagcattcttttgatgacagatatgcttcaaggagccatcaggcaaggatagccaccctctacctgcctctgtttggtctgctgattgaaaacgtccagcggatcaatgtgagggatgtgtcacccttccctgtgaacgcgggcatgactgtgaaggatgaatccctggctctaccagctgtgaatccgctggtgacgccgcagaagggaagcaccctggacaacagcctgcacaaggacctgctgggcgccatctccggcattgcttctccatatacaacctcaactccaaacatcaacagtgtgagaaatgctgattcgagaggatctctcataagcacagattcgggtaacagccttccagaaaggaatagtgagaagagcaattccctggataagcaccaacaaagtagcacattgggaaattccgtggttcgctgtgataaacttgaccagtctgagattaagagcctactgatgtgtttcctctacatcttaaagagcatgtctgatgatgctttgtttacatattggaacaaggcttcaacatctgaacttatggatttttttacaatatctgaagtctgcctgcaccagttccagtacatggggaagcgatacatagccagaacaggaatgatgcatgccagattgcagcagctgggcagcctggataactctctcacttttaaccacagctatggccactcggacgcagatgttctgcaccagtcattacttgaagccaacattgctactgaggtttgcctgacagctctggacacgctttctctatttacattggcgtttaagaaccagctcctggccgaccatggacataatcctctcatgaaaaaagtttttgatgtctacctgtgttttcttcaaaaacatcagtctgaaacggctttaaaaaatgtcttcactgccttaaggtccttaatttataagtttccctcaacattctatgaagggagagcggacatgtgtgcggctctgtgttacgagattctcaagtgctgtaactccaagctgagctccatcaggacggaggcctcccagctgctctacttcctgatgaggaacaactttgattacactggaaagaagtcctttgtccggacacatttgcaagtcatcatatctgtcagccagctgatagcagacgttgttggcattgggggaaccagattccagcagtccctgtccatcatcaacaactgtgccaacagtgaccggcttattaagcacaccagcttctcctctgatgtgaaggacttaaccaaaaggatacgcacggtgctaatggccaccgcccagatgaaggagcatgagaacgacccagagatgctggtggacctccagtacagcctggccaaatcctatgccagcacgcccgagctcaggaagacgtggctcgacagcatggccaggatccatgtcaaaaatggcgatctctcagaggcagcaatgtgctatgtccacgtaacagccctagtggcagaatatctcacacggaaagaagcagtccagtgggagccgccccttctcccccacagccatagcgcctgcctgaggaggagccggggaggcgtgtttagacaaggatgcaccgccttcagggtcattaccccaaacatcgacgaggaggcctccatgatggaagacgtggggatgcaggatgtccatttcaacgaggatgtgctgatggagctccttgagcagtgcgcagatggactctggaaagccgagcgctacgagctcatcgccgacatctacaaacttatcatccccatttatgagaagcggagggattttgagaggctggcccatctgtatgacacgctgcaccgggcctacagcaaagtgaccgaggtcatgcactcgggccgcaggcttctggggacctacttccgggtagccttcttcgggcaggcagcgcaataccagtttacagacagtgaaacagatgtggagggattctttgaagatgaagatggaaaggagtatatttacaaggaacccaaactcacaccgctgtcggaaatttctcagagactccttaaactgtactcggataaatttggttctgaaaatgtcaaaatgatacaggattctggcaaggtcaaccctaaggatctggattctaagtatgcatacatccaggtgactcacgtcatccccttctttgacgaaaaagagttgcaagaaaggaaaacagagtttgagagatcccacaacatccgccgcttcatgtttgagatgccatttacgcagaccgggaagaggcagggcggggtggaagagcagtgcaaacggcgcaccatcctgacagccatacactgcttcccttatgtgaagaagcgcatccctgtcatgtaccagcaccacactgacctgaaccccatcgaggtggccattgacgagatgagtaagaaggtggcggagctccggcagctgtgctcctcggccgaggtggacatgatcaaactgcagctcaaactccagggcagcgtgagtgttcaggtcaatgctggcccactagcatatgcgcgagctttcttagatgatacaaacacaaagcgatatcctgacaataaagtgaagctgcttaaggaagttttcaggcaatttgtggaagcttgcggtcaagccttagcggtaaacgaacgtctgattaaagaagaccagctcgagtatcaggaagaaatgaaagccaactacagggaaatggcgaaggagctttctgaaatcatgcatgagcagctgggatgatctgccccctggaggagaagacgagcgtcttaccgaattcccttcacatcttcaacgccatcagtgggactccaacaagcacaatggttcacgggatgaccagctcgtcttcggtcgtgtgattacatctcatggcccgtgtgtggggacttgctttgtcatttgcaaactcaggatgctttccaaagccaatcactggggagaccgagcacagggaggaccaaggggaaggggagagaaaggaaataaagaacaacgttatttcttaacagactttctataggagttgtaagaaggtgcacatatttttttaaatctcactggcaatattcaaagttttcattgtgtcttaacaaaggtgtggtagacactcttgagctggacttagattttattcttccttgcagagtagtgttagaatagatggcctacagaaaaaaaaggttctgggatctacatggcagggagggctgcactgacattgatgcctgggggaccttttgcctcgaggctgagctggaaaatcttgaaaatattttttttttcctgtggcacattcaggttgaatacaagaactatttttgtgactagtttttgatgacctaagggaactgaccattgtaatttttgtaccagtgaaccaggagatttagtgcttttatattcatttccttgcatttaagaaaatatgaaagcttaaggaattatgtgagcttaaaactagtcaagcagtttagaaccaaaggcctatattaataaccgcaactatgctgaaaagtacaaagtagtacagtatattgttatgtacatatcattgttaatacagtcctggcattctgtacatatatgtattacatttctacatttttaatactcacatgggcttatgcattaagtttaattgtgataaatttgtgctgttccagtatatgcaatacactttaatgttttattcttgtacataaaaatgtgcaatatggagatgtatacagtctttactatattaggtttataaacagttttaagaatttcatccttttgccaaaatggtggagtatgtaattggtaaatcataaatcctgtggtgaatggtggtgtactttaaagctgtcaccatgttatattttcttttaagactttaatttagtaattttatatttgggaaaataaaggtttttaattttatttaactggaatcactgccctgctgtaattaaacattctgtaccacatctgtattaaaaagacattgctgaccattaaaaaaaaaaaaaaaaaa

SEQ ID NO: 672 - protein, 2069 aa, Homo sapiens
MSQPPLLPASAETRKFTRALSKPGTAAELRQSVSEVVRGSVLLAKPKLIEPLDYENVIVQKKTQILNDCLREMLLFPYDDFQTAILRRQGRYICSTVPAKAEEEAQSLFVTECIKTYNSDWHLVNYKYEDYSGEFRQLPNKVVKLDKLPVHVYEVDEEVDKDEDAASLGSQKGGITKHGWLYKGNMNSAISVTMRSFKRRFFHLIQLGDGSYNLNFYKDEKISKEPKGSIFLDSCMGVVQNNKVRRFAFELKMQDKSSYLLAADSEVEMEEWITILNKILQLNFEAAMQEKRNGDSHEDDEQSKLEGSGSGLDSYLPELAKSAREAEIKLKSESRVKLFYLDPDAQKLDFSSAEPEVKSFEEKFGKRILVKCNDLSFNLQCCVAENEEGPTTNVEPFFVTLSLFDIKYNRKISADFHVDLNHFSVRQMLATTSPALMNGSGQSPSVLKGILHEAAMQYPKQGIFSVTCPHPDIFLVARIEKVLQGSITHCAEPYMKSSDSSKVAQKVLKNAKQACQRLGQYRMPFAWAARTLFKDASGNLDKNARFSAIYRQDSNKLSNDDMLKLLADFRKPEKMAKLPVILGNLDITIDNVSSDFPNYVNSSYIPTKQFETCSKTPITFEVEEFVPCIPKHTQPYTIYTNHLYVYPKYLKYDSQKSFAKARNIAICIEFKDSDEEDSQPLKCIYGRPGGPVFTRSAFAAVLHHHQNPEFYDEIKIELPTQLHEKHHLLLTFFHVSCDNSSKGSTKKRDVVETQVGYSWLPLLKDGRVVTSEQHIPVSANLPSGYLGYQELGMGRHYGPEIKWVDGGKPLLKISTHLVSTVYTQDQHLHNFFQYCQKTESGAQALGNELVKYLKSLHAMEGHVMIAFLPTILNQLFRVLTRATQEEVAVNVTRVIIHVVAQCHEEGLESHLRSYVKYAYKAEPYVASEYKTVHEELTKSMTTILKPSADFLTSNKLLKYSWFFFDVLIKSMAQHLIENSKVKLLRNQRFPASYHHAVETVVNMLMPHITQKFRDNPEASKNANHSLAVFIKRCFTFMDRGFVFKQINNYISCFAPGDPKTLFEYKFEFLRVVCNHEHYIPLNLPMPFGKGRIQRYQDLQLDYSLTDEFCRNHFLVGLLLREVGTALQEFREVRLIAISVLKNLLIKHSFDDRYASRSHQARIATLYLPLFGLLIENVQRINVRDVSPFPVNAGMTVKDESLALPAVNPLVTPQKGSTLDNSLHKDLLGAISGIASPYTTSTPNINSVRNADSRGSLISTDSGNSLPERNSEKSNSLDKHQQSSTLGNSVVRCDKLDQSEIKSLLMCFLYILKSMSDDALFTYWNKASTSELMDFFTISEVCLHQFQYMGKRYIARTGMMHARLQQLGSLDNSLTFNHSYGHSDADVLHQSLLEANIATEVCLTALDTLSLFTLAFKNQLLADHGHNPLMKKVFDVYLCFLQKHQSETALKNVFTALRSLIYKFPSTFYEGRADMCAALCYEILKCCNSKLSSIRTEASQLLYFLMRNNFDYTGKKSFVRTHLQVIISVSQLIADVVGIGGTRFQQSLSIINNCANSDRLIKHTSFSSDVKDLTKRIRTVLMATAQMKEHENDPEMLVDLQYSLAKSYASTPELRKTWLDSMARIHVKNGDLSEAAMCYVHVTALVAEYLTRKEAVQWEPPLLPHSHSACLRRSRGGVFRQGCTAFRVITPNIDEEASMMEDVGMQDVHFNEDVLMELLEQCADGLWKAERYELIADIYKLIIPIYEKRRDFERLAHLYDTLHRAYSKVTEVMHSGRRLLGTYFRVAFFGQAAQYQFTDSETDVEGFFEDEDGKEYIYKEPKLTPLSEISQRLLKLYSDKFGSENVKMIQDSGKVNPKDLDSKYAYIQVTHVIPFFDEKELQERKTEFERSHNIRRFMFEMPFTQTGKRQGGVEEQCKRRTILTAIHCFPYVKKRIPVMYQHHTDLNPIEVAIDEMSKKVAELRQLCSSAEVDMIKLQLKLQGSVSVQVNAGPLAYARAFLDDTNTKRYPDNKVKLLKEVFRQFVEACGQALAVNERLIKEDQLEYQEEMKANYREMAKELSEIMHEQLG

SEQ ID NO: 673 - DNA, 655 bp, Homo sapiens
  CDS (104)..(472)
acttggtgggagacgctcaagagagcaagatgttctcgtgttgcttctccactttgagaggttgctgcttcaggaacggagggagtgagagccttttctgacgatgccgaagaaggctcatccctcaccccagacgcctgtcgcccgttgtaataaggcgcatccagctcctggtccatgtgcagaagtaagagcactgccagcaccagcggcggagccagagccagcatgggaagaggcccctccagagagagcactggagctggagggagctccagccaaggaccagaccaatgaggagctgcctgaaatcacggaggtgccggagagcattaaaagaaggctgggaggaagagttccagcagctacgcctgctcccagaggcaacctcctcctccaggcatggatgcgggtccacagctgggcatccaggctgtttgcccctaatgtgctgcccgggacaggcccttaacaggcgggcagtgggtgaggggaccaggaggtggctccaaagggtaaagcaaacaaagcttttaacgacagccgttgtgccccaggctctccatgccaccacctgccctaccatttattaatagtgttagaattacaagttgatgaaacgagattacaataaagtttgatttctgaaacttca

SEQ ID NO: 674 - protein, 122 aa, Homo sapiens
MPKKAHPSPQTPVARCNKAHPAPGPCAEVRALPAPAAEPEPAWEEAPPERALELEGAPAKDQTNEELPEITEVPESIKRRLGGRVPAATPAPRGNLLLQAWMRVHSWASRLFAPNVLPGTGP

SEQ ID NO: 675 - DNA, 1815 bp, Homo sapiens
  CDS (12)..(581)
cttagctgaagatgactgacagtgttatttattccatgttagagttgcctacggcaacccaagcccagaatgactatggaccacagcaaaaatcttcctcttccaggccttcttgttcttgccttgtggcaatagctttggggcttctgactgcagttcttctgagtgtgctgctataccagtggatcctgtgccagggctccaactactccacttgtgccagctgtcctagctgcccagaccgctggatgaaatatggtaaccattgttattatttctcagtggaggaaaaggactggaattctagtctggaattctgcctagccagagactcacacctccttgtgataacggacaatcaggaaatgagcctgctccaagttttcctcagtgaggccttttgctggattggtctgaggaacaattctggctggaggtgggaagatggatcacctctaaacttctcaaggatttcttctaatagctttgtgcagacatgcggtgccatcaacaaaaatggtcttcaagcctcaagctgtgaagttcctttacactgggtgtgtaagaaggtcagactttgatagatgaccactctgtcctgaccctcagatctgtcatgtatccctaaaaggagggagctggccactggctgttgggaaagccatgagtatatagttagcaaatactgaactttctcagatatggcattagatgcaagacaacctcctagggattgatgcctaactgatggattctctttgagactatttagatattatgtgagcaatttaaagaccagatctaagcaaattttgaaatagatgtttgttttttgtatttctcagtatggaaactaatgctgccactctcatccccgtcccaaccatctctgtcaaaaatatacctttttcatatgatattctgagctaatctgataaaatctatgccaatatatactattgcttgtgtactagagaagtacattattgctgtactcctctgtacattactgatccctgatggtatatttctatcctaacagtgtccctttgcagatcaagctttattctgaagaataaacctagctggcatgctggtgtgtacctgtagtcctagctatttgggaagctgaggtgggagggtcgcttgagcccaggagtttgaggctgcagtgagctatgattgtgccactgtactccagcctgggagatagagcaagactccatctctaaaaaaaaaaaaaaatgctaatgtgagaatataaattgtgggaaatgagtgagggcaaggtggtacttcctccttctgagctcttcacacgtaatgcaaaaacccggtcttaactgattttgttttttttctgagtatgcatatatgtggttgaatgaaccaatgtgtgattgtatcttttccattatgtgactgtttgacctgcatattaatttcaagatagcagtcaattcgataaggcattttcatagaggaaagtttacagaaacagtttatgtggttggatcaccaaattatcttaggtactaaggcctcaaaaataagaaaaactttattatttctcctcagtagagtttggacatacataaggagagaaggtacagtgatgaaggagaccataattctgtagtgttgatgatcctggattataatctttttctctttatctttcatagtttttttaaaaacatggactgtatcttatctaccactatatcccaaatacctaagatagtgcttacgttcagtgactattaaataaataaatggatgaattaaaaaaaaaaaaaaaaaaaaaaaaaaaaa

SEQ ID NO: 676 - protein, 189 aa, Homo sapiens
MTDSVIYSMLELPTATQAQNDYGPQQKSSSSRPSCSCLVAIALGLLTAVLLSVLLYQWILCQGSNYSTCASCPSCPDRWMKYGNHCYYFSVEEKDWNSSLEFCLARDSHLLVITDNQEMSLLQVFLSEAFCWIGLRNNSGWRWEDGSPLNFSRISSNSFVQTCGAINKNGLQASSCEVPLHWVCKKVRL

SEQ ID NO: 677 - DNA, 3041 bp, Homo sapiens
  CDS (135)..(1478)
gcgctctaacggccaggcccagccgcttgaggctccccaacggccaggccgcgcccccgcgtgcgtgcgcggcccggcagagccgtgcgggcgcccgcgtactcactagctgaggtggcagtggttccaccaacatggagctctcgcagatgtcggagctcatggggctgtcggtgttgcttgggctgctggccctgatggcgacggcggcggtagcgcgggggtggctgcgcgcgggggaggagaggagcggccggcccgcctgccaaaaagcaaatggatttccacctgacaaatcttcgggatccaagaagcagaaacaatatcagcggattcggaaggagaagcctcaacaacacaacttcacccaccgcctcctggctgcagctctgaagagccacagcgggaacatatcttgcatggactttagcagcaatggcaaatacctggctacctgtgcagatgatcgcaccatccgcatctggagcaccaaggacttcctgcagcgagagcaccgcagcatgagagccaacgtggagctggaccacgccaccctggtgcgcttcagccctgactgcagagccttcatcgtctggctggccaacggggacaccctccgtgtcttcaagatgaccaagcgggaggatgggggctacaccttcacagccaccccagaggacttccctaaaaagcacaaggcgcctgtcatcgacattggcattgctaacacagggaagtttatcatgactgcctccagtgacaccactgtcctcatctggagcctgaagggtcaagtgctgtctaccatcaacaccaaccagatgaacaacacacacgctgctgtatctccctgtggcagatttgtagcctcgtgtggcttcaccccagatgtgaaggtttgggaagtctgctttggaaagaagggggagttccaggaggtggtgcgagccttcgaactaaagggccactccgcggctgtgcactcgtttgctttctccaacgactcacggaggatggcttctgtctccaaggatggtacatggaaactgtgggacacagatgtggaatacaagaagaagcaggacccctacttgctgaagacaggccgctttgaagaggcggcgggtgccgcgccgtgccgcctggccctctcccccaacgcccaggtcttggccttggccagtggcagtagtattcatctctacaatacccggcggggcgagaaggaggagtgctttgagcgggtccatggcgagtgtatcgccaacttgtcctttgacatcactggccgctttctggcctcctgtggggaccgggcggtgcggctgtttcacaacactcctggccaccgagccatggtggaggagatgcagggccacctgaagcgggcctccaacgagagcacccgccagaggctgcagcagcagctgacccaggcccaagagaccctgaagagcctgggtgccctgaagaagtgactctgggagggcccggcgcagaggattgaggaggagggatctggcctcctcatggcactgctgccatctttcctcccaggtggaagcctttcagaaggagtctcctggttttcttactggtggccctgcttcttcccattgaaactactcttgtctacttaggtctctctcttcttgctggctgtgactcctccctgactagtggccaaggtgcttttcttcctcccaggcccagtgggtggaatctgtccccacctggcactgaggagaatggtagagaggagaggagagagagagagaatgtgatttttggccttgtggcagcacatcctcacacccaaagaagtttgtaaatgttccagaacaacctagagaacacctgagtactaagcagcagttttgcaaggatgggagactgggatagcttcccatcacagaactgtgttccatcaaaaagacactaagggatttccttctgggcctcagttctatttgtaagatggagaataatcctctctgtgaactccttgcaaagatgatatgaggctaagagaatatcaagtccccaggtctggaagaaaagtagaaaagagtagtactattgtccaatgtcatgaaagtggtaaaagtgggaaccagtgtgctttgaaaccaaattagaaacacattccttgggaaggcaaagttttctgggacttgatcatacattttatatggttgggacttctctcttcgggagatgatatcttgtttaaggagacctcttttcagttcatcaagttcatcagatatttgagtgcccactctgtgcccaaataaatatgagctggggattaaatacgaataagacatggtttctgccatcaaagatggctggtgggagagagagatacacccttattaagtgctttgtgttagtttattcatagctattgttatatatgtcaaggcaagagaggaccagagcaggacagaggcaatgggtattgaagttgaaggggtacatttgataagagagtcggtattgagaagtttaaatttgtgaatttgaaggctgcgtgggtgtggcaggtaagggaaatgaggtatctgggaaggcttgagtgtaggcaaatttattcatcccaagtcaaactcttgatctctctcacgaaaactatgaccccccctggttgcccctgacctctcaatgttggaacaagccacaaccgtggagttatccttgatgactccccattcattatcccttctgtcccaccaccacagctgtcatctgttcaccagaacgttcttttggttacactccatgtgacatcctgaggctgttgcttctctccagcttttctgttaccatcctggtcctggctactgtcacctagtgggccactataatatggcttcctaatggatcttcctgcttcctctgttgcctcattacttttctatatagcagaatgatcttttgaaaatgtgaaccagatcacattattccctagttaaaaccccccaaggcttcccatcacacttggaataaaatccaaaagaatttttctaaaccaaaaa

SEQ ID NO: 678 - protein, 447 aa, Homo sapiens
MELSQMSELMGLSVLLGLLALMATAAVARGWLRAGEERSGRPACQKANGFPPDKSSGSKKQKQYQRIRKEKPQQHNFTHRLLAAALKSHSGNISCMDFSSNGKYLATCADDRTIRIWSTKDFLQREHRSMRANVELDHATLVRFSPDCRAFIVWLANGDTLRVFKMTKREDGGYTFTATPEDFPKKHKAPVIDIGIANTGKFIMTASSDTTVLIWSLKGQVLSTINTNQMNNTHAAVSPCGRFVASCGFTPDVKVWEVCFGKKGEFQEVVRAFELKGHSAAVHSFAFSNDSRRMASVSKDGTWKLWDTDVEYKKKQDPYLLKTGRFEEAAGAAPCRLALSPNAQVLALASGSSIHLYNTRRGEKEECFERVHGECIANLSFDITGRFLASCGDRAVRLFHNTPGHRAMVEEMQGHLKRASNESTRQRLQQQLTQAQETLKSLGALKK

SEQ ID NO: 679 - DNA, 1128 bp, Homo sapiens
  CDS (229)..(1062)
gcgtgggcagggggcgggcccgggagttggaacagagggcacagacggcccctcctcggaggggagggaccggagccggggcctttttctttaagactcgcagcactggatcccagaacttagtctgcgcggcggcattgacactagctgggctcctcggggcgcgccccaggtggtccgaagcccggtccgccctccacgcaggtgccccgcgctccccgctcagccatgtcgtcctgcagccgcgtggcgctggtgaccggggccaacaggggcatcggcttggccatcgcgcgcgaactgtgccgacagttctctggggatgtggtgctcaccgcgcgggacgtggcgcggggccaggcggccgtgcagcagctgcaggcggagggcctgagcccgcgcttccaccaactggacatcgacgacttgcagagcatccgcgccctgcgcgacttcctgcgcaaggagtacggggggctcaacgtactggtcaacaacgcggccgtcgccttcaagagtgatgatccaatgccctttgacattaaagctgagatgacactgaagacaaatttttttgccactagaaacatgtgcaacgagttactgccgataatgaaacctcatgggagagtggtgaatatcagtagtttgcagtgtttaagggcttttgaaaactgcagtgaagatctgcaggaaaggttccacagtgagacactcacagaaggagacctggtggatctcatgaaaaagtttgtggaggacacaaaaaatgaggtgcatgagagggaaggctggcccaactcaccttatggggtgtccaagttgggggtcacggtcttatcgaggatcctggccaggcgtctggatgagaagaggaaagctgacaggattctggtgaatgcgtgctgcccaggaccagtgaagacagacatggatgggaaagacagcatcaggactgtggaggagggggctgagacccctgtctacttggccctcttgcctccagatgccactgagccacaaggccagttggtccatgacaaagttgtgcaaaactggtaaacgtctgcttcggagcttgctgcttaataaatgttggtggaatgaatgaaaaaaaaaaaaaaaaaa

SEQ ID NO: 680 - protein, 277 aa, Homo sapiens
MSSCSRVALVTGANRGIGLAIARELCRQFSGDVVLTARDVARGQAAVQQLQAEGLSPRFHQLDIDDLQSIRALRDFLRKEYGGLNVLVNNAAVAFKSDDPMPFDIKAEMTLKTNFFATRNMCNELLPIMKPHGRVVNISSLQCLRAFENCSEDLQERFHSETLTEGDLVDLMKKFVEDTKNEVHEREGWPNSPYGVSKLGVTVLSRILARRLDEKRKADRILVNACCPGPVKTDMDGKDSIRTVEEGAETPVYLALLPPDATEPQGQLVHDKVVQNW

SEQ ID NO: 681 - DNA, 1408 bp, Homo sapiens
  CDS (66)..(1313)
ggggatctcatttctccccagggggctctaggctgtggatgtgagaaggggagcaagggaggcagatggcgacaaggaacagccccatgcccctgggcacggctcagggtgaccctggagaggcaggaacacggcccggccctgacgccagcctccgggacacaggtgcggccactcagctcaagatgaagcccaggaaggtgcacaagatcaaggcggtcatcatcgacctgggctcccagtactgcaagtgcggctacgcgggagagccgaggcccacctacttcatctcctccaccgtgggcaaacgctgccccgaggcggccgacgctggcgacacccgcaagtggactttagtgggccatgagctgctcaacacggaggcgcctctcaagctggtgaacccgctgaagcacggcatcgtggtggactgggactgcgtgcaggacatctgggagtacatcttccgcaccgccatgaagatcctccccgaggagcacgctgtgctggtctccgaccctccgctcagccccagcagcaaccgggagaagtacgcggagctcatgtttgagaccttcggcatcccagccatgcacgtgacgtcccagtcgttgctgtccatctactcctacggcaagacctcggggctggtggtggagagcgggcacggcgtctcgcacgtggtgcccatatccgagggcgacgtgctgccgggcctgaccagccgcgccgactacgctgggggtgacctcaccaactacctgatgcagctgctcaatgaggcgggccacgcattcacggacgaccacctgcacatcatagagcacatcaagaagaagtgctgctatgcggccttcctgcccgaggaggagctgggcctggtcccggaggagctgcgcgtggactacgagctcccggacggcaaactcatcactattggccaggagcgcttccgttgctctgagatgctcttccagccctccctggcaggcagcacccagccgggcctcccggagctcacagctgcctgcctgggccgctgccaggacacgggcttcaaggaggagatggccgccaacgtgctactgtgtggcggctgcactatgctggatggcttccccgagcgcttccagagggagctgagcctcctctgccccggggacagccctgcagtggctgccgctcctgagaggaagacctccgtgtggaccggcggttccatcctggcctccctgcaggccttccaacagctctgggtcagcaaggaagagtttgaggagcggggcagcgtggccatctacagcaagtgctgagcctcggcatttccacagacaaggcctccagcacagatggccacaggcctctctatacacatttacagaatttcacataaaggtttactctgaaa

SEQ ID NO: 682 - protein, 415 aa, Homo sapiens
MATRNSPMPLGTAQGDPGEAGTRPGPDASLRDTGAATQLKMKPRKVHKIKAVIIDLGSQYCKCGYAGEPRPTYFISSTVGKRCPEAADAGDTRKWTLVGHELLNTEAPLKLVNPLKHGIVVDWDCVQDIWEYIFRTAMKILPEEHAVLVSDPPLSPSSNREKYAELMFETFGIPAMHVTSQSLLSIYSYGKTSGLVVESGHGVSHVVPISEGDVLPGLTSRADYAGGDLTNYLMQLLNEAGHAFTDDHLHIIEHIKKKCCYAAFLPEEELGLVPEELRVDYELPDGKLITIGQERFRCSEMLFQPSLAGSTQPGLPELTAACLGRCQDTGFKEEMAANVLLCGGCTMLDGFPERFQRELSLLCPGDSPAVAAAPERKTSVWTGGSILASLQAFQQLWVSKEEFEERGSVAIYSKC

SEQ ID NO: 683 - DNA, 2377 bp, Homo sapiens
  CDS (525)..(1889)
acccccgagctgtgctgctcgcggccgccaccgccgggccccggccgtccctggctcccctcctgcctcgagaagggcagggcttctcagaggcttggcgggaaaaagaacggagggagggatcgcgctgagtataaaagccggttttcggggctttatctaactcgctgtagtaattccagcgagaggcagagggagcgagcgggcggccggctagggtggaagagccgggcgagcagagctgcgctgcgggcgtcctgggaagggagatccggagcgaatagggggcttcgcctctggcccagccctcccgctgatcccccagccagcggtccgcaacccttgccgcatccacgaaactttgcccatagcagcgggcgggcactttgcactggaacttacaacacccgagcaaggacgcgactctcccgacgcggggaggctattctgcccatttggggacacttccccgccgctgccaggacccgcttctctgaaaggctctccttgcagctgcttagacgctggatttttttcgggtagtggaaaaccagcagcctcccgcgacgatgcccctcaacgttagcttcaccaacaggaactatgacctcgactacgactcggtgcagccgtatttctactgcgacgaggaggagaacttctaccagcagcagcagcagagcgagctgcagcccccggcgcccagcgaggatatctggaagaaattcgagctgctgcccaccccgcccctgtcccctagccgccgctccgggctctgctcgccctcctacgttgcggtcacacccttctcccttcggggagacaacgacggcggtggcgggagcttctccacggccgaccagctggagatggtgaccgagctgctgggaggagacatggtgaaccagagtttcatctgcgacccggacgacgagaccttcatcaaaaacatcatcatccaggactgtatgtggagcggcttctcggccgccgccaagctcgtctcagagaagctggcctcctaccaggctgcgcgcaaagacagcggcagcccgaaccccgcccgcggccacagcgtctgctccacctccagcttgtacctgcaggatctgagcgccgccgcctcagagtgcatcgacccctcggtggtcttcccctaccctctcaacgacagcagctcgcccaagtcctgcgcctcgcaagactccagcgccttctctccgtcctcggattctctgctctcctcgacggagtcctccccgcagggcagccccgagcccctggtgctccatgaggagacaccgcccaccaccagcagcgactctgaggaggaacaagaagatgaggaagaaatcgatgttgtttctgtggaaaagaggcaggctcctggcaaaaggtcagagtctggatcaccttctgctggaggccacagcaaacctcctcacagcccactggtcctcaagaggtgccacgtctccacacatcagcacaactacgcagcgcctccctccactcggaaggactatcctgctgccaagagggtcaagttggacagtgtcagagtcctgagacagatcagcaacaaccgaaaatgcaccagccccaggtcctcggacaccgaggagaatgtcaagaggcgaacacacaacgtcttggagcgccagaggaggaacgagctaaaacggagcttttttgccctgcgtgaccagatcccggagttggaaaacaatgaaaaggcccccaaggtagttatccttaaaaaagccacagcatacatcctgtccgtccaagcagaggagcaaaagctcatttctgaagaggacttgttgcggaaacgacgagaacagttgaaacacaaacttgaacagctacggaactcttgtgcgtaaggaaaagtaaggaaaacgattccttctaacagaaatgtcctgagcaatcacctatgaacttgtttcaaatgcatgatcaaatgcaacctcacaaccttggctgagtcttgagactgaaagatttagccataatgtaaactgcctcaaattggactttgggcataaaagaacttttttatgcttaccatcttttttttttctttaacagatttgtatttaagaattgtttttaaaaaattttaagatttacacaatgtttctctgtaaatattgccattaaatgtaaataactttaataaaacgtttatagcagttacacagaatttcaatcctagtatatagtacctagtattataggtactataaaccctaattttttttatttaagtacattttgctttttaaagttgatttttttctattgtttttagaaaaaataaaataactggcaaatatatcattgagccaaaaaaaaaaaaaaaaaaaaa

SEQ ID NO: 684 - protein, 454 aa, Homo sapiens
LDFFRVVENQQPPATMPLNVSFTNRNYDLDYDSVQPYFYCDEEENFYQQQQQSELQPPAPSEDIWKKFELLPTPPLSPSRRSGLCSPSYVAVTPFSLRGDNDGGGGSFSTADQLEMVTELLGGDMVNQSFICDPDDETFIKNIIIQDCMWSGFSAAAKLVSEKLASYQAARKDSGSPNPARGHSVCSTSSLYLQDLSAAASECIDPSVVFPYPLNDSSSPKSCASQDSSAFSPSSDSLLSSTESSPQGSPEPLVLHEETPPTTSSDSEEEQEDEEEIDVVSVEKRQAPGKRSESGSPSAGGHSKPPHSPLVLKRCHVSTHQHNYAAPPSTRKDYPAAKRVKLDSVRVLRQISNNRKCTSPRSSDTEENVKRRTHNVLERQRRNELKRSFFALRDQIPELENNEKAPKVVILKKATAYILSVQAEEQKLISEEDLLRKRREQLKHKLEQLRNSCA

SEQ ID NO: 685 - DNA, 3230 bp, Homo sapiens
  CDS (838)..(2517)
agcagtgttctcttcgtccccctcccccaaactgaggattgggcaataccacagaacctcaggaaaggggggaagagcgagcttcggccccactaatgggggagtgggcggaggctggatttcccacctcggctgcacctgggcactggaggctgaagaggaaagtgagaatctgaagttttgagacctctgactggccaggaatagctcctggggcggggggcaaggatgggaccataggcggaaagagtctcgcggtcccccctgcttctggcgcgggtccctgcgcccggttgtggagcgtctcgcgcggggagggggcggggggaacggcagctcgcggtgttgttcactcgcgcgtcgagcacacggtgggtccggcggcgggttggcgccccaggcggcgttccctgtggcctggcgcctgggccgctgccctgagcgggttccgccccagagcccgaccctcctgggggctctaggcggagtcccgcgagccgagggggaccggcgaccgctgccgaagcatgaagaaggggtaaggcgtgagcccccaagatttcacgcatgccccctagcttcggtactctgacaccttctcttgcacttgcggatgatgaactggaataacgatgaaagaaagcacatccgatctcaacattcacgtcctgccctataaccgattaattaattgatccccagctagactagtgttggagaaatcagcatgttaaaacaactgttgatgatagctgttggagtaaagttgcagtggaagctatggctgcaaaatcgttaaaatcttcaaggtgaactggcacaaaggttaatctcaagatgccgctagtgaaaagaaacatcgatcctaggcacttgtgccacacagcactgcctagaggcattaagaatgaactggaatgtgtaaccaatatttccttggcaaatataattagacaactaagtagcctaagtaaatatgctgaagatatatttggagaattattcaatgaagcacatagtttttccttcagagtcaactcattgcaagaacgtgtggaccgtttatctgttagtgttacacagcttgatccaaaggaagaagaattgtctttgcaagatataacaatgaggaaagctttccgaagttctacaattcaagaccagcagcttttcgatcgcaagactttgcctattccattacaggagacgtacgatgtttgtgaacagcctccacctctcaatatactcactccttatagagatgatggtaaagaaggtctgaagttttataccaatccttcgtatttctttgatctatggaaagaaaaaatgttgcaagatacagaggataagaggaaggaaaagaggaagcagaagcagaaaaatctagatcgtcctcatgaaccagaaaaagtgccaagagcacctcatgacaggcggcgagaatggcagaagctggcccaaggtccagagctggctgaagatgatgctaatctcttacataagcatattgaagttgctaatggcccagcctctcattttgaaacaagacctcagacatacgtggatcatatggatggatcttactcactttctgccttgccatttagtcagatgagtgagcttctgactagagctgaggaaagggtattagtcagaccacatgaaccacctccacctccaccaatgcatggagcaggagatgcaaaaccgatacccacctgtatcagttctgctacaggtttgatagaaaatcgccctcagtcaccagctacaggcagaacacctgtgtttgtgagccccactcccccacctcctccaccacctcttccatctgccttgtcaacttcctcattaagagcttcaatgacttcaactcctccccctccagtacctcccccacctccacctccagccactgctttgcaagctccagcagtaccaccacctccagctcctcttcagattgcccctggagttcttcacccagctcctcctccaattgcacctcctctagtacagccctctccaccagtagctagagctgccccagtatgtgagactgtaccagttcatccactcccacaaggtgaagttcaggggctgcctccacccccaccaccgcctcctctgcctccacctggcattcgaccatcatcacctgtcacagttacagctcttgctcatcctccctctgggctacatccaactccatctactgccccaggtccccatgttccattaatgcctccatctcctccatcacaagttatacctgcttctgagccaaagcgccatccatcaaccctacctgtaatcagtgatgccaggagtgtgctactggaagcaatacgaaaaggtattcagctacgcaaagtagaagagcagcgtgaacaggaagctaagcatgaacgcattgaaaacgatgttgccaccatcctgtctcgccgtattgctgttgaatatagtgattcggaagatgattcagaatttgatgaagtagattggttggagtaagaaaaatgcattgataaatattacaaaactgaatgcaaatgtcctttgtggtgcttgttccttgaaaatgtttggtcattctagtgttttgctttcttttccttataataaatgacccttttcctccataacttttgatttctaaggaaaatattagcatacatttcaaactaaatgttttacagtggcttatcttttttttccccctgaaaagactaatttggtcaaataaaccactaagtattaagcatggacagctgttgttagagtagcagattcagttttttgatatatcttaattgtgtactttgtgaattttaatttaaagaaagcaactgaaattgaaatcttgagggcagctgtgtctactaatgagccttattccatttcctgatgttttaaaagaagaaacactgccttgattatacgaatacactcagaaagtacatttagcttgtagtgttgaattctcttaaaggaatgcttgaattttttcattattgttttattgtttttatatacttgccttatttgaatgtttagcagtatccccttcccacttatatattgtgtgatatgattttgcttgcctataggagttaaaaacttttccatgtgaaatactctgacttaaacatacatgtaacttacataactgttaagaataacagtctgatttaataaatggttcattttaaaagttaaaaaaaaaa

SEQ ID NO: 686 - protein, 559 aa, Homo sapiens
MPLVKRNIDPRHLCHTALPRGIKNELECVTNISLANIIRQLSSLSKYAEDIFGELFNEAHSFSFRVNSLQERVDRLSVSVTQLDPKEEELSLQDITMRKAFRSSTIQDQQLFDRKTLPIPLQETYDVCEQPPPLNILTPYRDDGKEGLKFYTNPSYFFDLWKEKMLQDTEDKRKEKRKQKQKNLDRPHEPEKVPRAPHDRRREWQKLAQGPELAEDDANLLHKHIEVANGPASHFETRPQTYVDHMDGSYSLSALPFSQMSELLTRAEERVLVRPHEPPPPPPMHGAGDAKPIPTCISSATGLIENRPQSPATGRTPVFVSPTPPPPPPPLPSALSTSSLRASMTSTPPPPVPPPPPPPATALQAPAVPPPPAPLQIAPGVLHPAPPPIAPPLVQPSPPVARAAPVCETVPVHPLPQGEVQGLPPPPPPPPLPPPGIRPSSPVTVTALAHPPSGLHPTPSTAPGPHVPLMPPSPPSQVIPASEPKRHPSTLPVISDARSVLLEAIRKGIQLRKVEEQREQEAKHERIENDVATILSRRIAVEYSDSEDDSEFDEVDWLE

SEQ ID NO: 687 - DNA, 1516 bp, Homo sapiens
  CDS (56)..(502)
aaatactggggccagctcaccctggtcagcctagcactctgacctagcagtcaacatgaaggctctcattgttctggggcttgtcctcctttctgttacggtccagggcaaggtctttgaaaggtgtgagttggccagaactctgaaaagattgggaatggatggctacaggggaatcagcctagcaaactggatgtgtttggccaaatgggagagtggttacaacacacgagctacaaactacaatgctggagacagaagcactgattatgggatatttcagatcaatagccgctactggtgtaatgatggcaaaaccccaggagcagttaatgcctgtcatttatcctgcagtgctttgctgcaagataacatcgctgatgctgtagcttgtgcaaagagggttgtccgtgatccacaaggcattagagcatgggtggcatggagaaatcgttgtcaaaacagagatgtccgtcagtatgttcaaggttgtggagtgtaactccagaattttccttcttcagctcattttgtctctctcacattaagggagtaggaattaagtgaaaggtcacactaccattatttccccttcaaacaaataatatttttacagaagcaggagcaaaatatggcctttcttctaagagatataatgttcactaatgtggttattttacattaagcctacaacatttttcagtttgcaaatagaactaatactggtgaaaatttacctaaaaccttggttatcaaatacatctccagtacattccgttctttttttttttgagacagtctcgctctgtcgcccaggctggagtgcagtggcgcaatctcggctcactgcaacctccacctcccgggttcacgccattctcctgcctcagcctcccgagtagctgggattacgggcgcccgccaccacgcccggctaattttttgtatttttagtagagacagggtttcaccgtgttagccaggatggtctcgatctcctgaccttgtgatccacccacctcggcctcccaaagtgctgggattacaggcgtgagccactgcgcccggccacattcagttcttatcaaagaaataacccagacttaatcttgaatgatacgattatgcccaatattaagtaaaaaatataagaaaaggttatcttaaatagatcttaggcaaaataccagctgatgaaggcatctgatgccttcatctgttcagtcatctccaaaaacagtaaaaataaccactttttgttgggcaatatgaaatttttaaaggagtagaataccaaatgatagaaacagactgcctgaattgagaattttgatttcttaaagtgtgtttctttctaaattgctgttccttaatttgattaatttaattcatgtattatgattaaatctgaggcagatgagcttacaagtattgaaataattactaattaatcacaaatgtgaagttatgcatgatgtaaaaaatacaaacattctaattaaaggctttgcaacac

SEQ ID NO: 688 - protein, 148 aa, Homo sapiens
MKALIVLGLVLLSVTVQGKVFERCELARTLKRLGMDGYRGISLANWMCLAKWESGYNTRATNYNAGDRSTDYGIFQINSRYWCNDGKTPGAVNACHLSCSALLQDNIADAVACAKRVVRDPQGIRAWVAWRNRCQNRDVRQYVQGCGV

SEQ ID NO: 689 - DNA, 2770 bp, Homo sapiens
  CDS (88)..(1596)
gaccggggtcggggcagggggcggggccgagcgggagaccagagagccggagccggatcccgatcccgagtccgagccgccgccgccatgagctgccccgtgcccgcctgctgcgcgctgctgctagtcctggggctctgccgggcgcgtccccggaacgcactgctgctcctcgcggatgacggaggctttgagagtggcgcgtacaacaacagcgccatcgccaccccgcacctggacgccttggcccgccgcagcctcctctttcgcaatgccttcacctcggtcagcagctgctctcccagccgcgccagcctcctcactggcctgccccagcatcagaatgggatgtacgggctgcaccaggacgtgcaccacttcaactccttcgacaaggtgcggagcctgccgctgctgctcagccaagctggtgtgcgcacaggcatcatcgggaagaagcacgtggggccggagaccgtgtacccgtttgactttgcgtacacggaggagaatggctccgtcctccaggtggggcggaacatcactagaattaagctgctcgtccggaaattcctgcagactcaggatgaccggcctttcttcctctacgtcgccttccacgacccccaccgctgtgggcactcccagccccagtacggaaccttctgtgagaagtttggcaacggagagagcggcatgggtcgtatcccagactggaccccccaggcctacgacccactggacgtgctggtgccttacttcgtccccaacaccccggcagcccgagccgacctggccgctcagtacaccaccgtcggccgcatggaccaaggagttggactggtgctccaggagctgcgtgacgccggtgtcctgaacgacacactggtgatcttcacgtccgacaacgggatccccttccccagcggcaggaccaacctgtactggccgggcactgctgaacccttactggtgtcatccccggagcacccaaaacgctggggccaagtcagcgaggcctacgtgagcctcctagacctcacgcccaccatcttggattggttctcgatcccgtaccccagctacgccatctttggctcgaagaccatccacctcactggccggtccctcctgccggcgctggaggccgagcccctctgggccaccgtctttggcagccagagccaccacgaggtcaccatgtcctaccccatgcgctccgtgcagcaccggcacttccgcctcgtgcacaacctcaacttcaagatgccctttcccatcgaccaggacttctacgtctcacccaccttccaggacctcctgaaccgcaccacagctggtcagcccacgggctggtacaaggacctccgtcattactactaccgggcgcgctgggagctctacgaccggagccgggacccccacgagacccagaacctggccaccgacccgcgctttgctcagcttctggagatgcttcgggaccagctggccaagtggcagtgggagacccacgacccctgggtgtgcgcccccgacggcgtcctggaggagaagctctctccccagtgccagcccctccacaatgagctgtgaccatcccaggaggcctgtgcacacatcccaggcatgtcccagacacatcccacacgtgtccgtgtggccggccagcctggggagtagtggcaacagcccttccgtccacactcccatccaaggagggttcttccttcctgtggggtcactcttgccattgcctggagggggaccagagcatgtgaccagagcatgtgcccagcccctccaccaccaggggcactgccgtcatggcaggggacacagttgtccttgtgtctgaaccatgtcccagcacgggaattctagacatacgtggtctgcggacagggcagcgcccccagcccatgacaagggagtcttgttttctggcttggtttggggacctgcaaatgggaggcctgaggccctcttcaggctttggcagccacagatacttctgaacccttcacagagagcaggcaggggcttcggtgccgcgtgggcagtacgcaggtcccaccgacactcacctgggagcacggcgcctggctcttaccagcgtctggcctagaggaagcctttgagcgacctttgggcaggtttctgcttcttctgttttgccccatggtcaagtccctgttccccaggcaggtttcagctgattggcagcaggctccctgagtgatgagcttgaacctgtggtgtttctgggcagaagcttatcttttttgagagtgtccgaagatgaaggcatggcgatgcccgtcctctggcttgggttaattcttcggtgacactggcattgctgggtggtgatgcccgtcctctggcttgggttaattcttcggtgacactggcgttgctgggtggcaatgcccatcctctgccttgggttaattcttcggtgacactggcgttgctgggtggcgatgcccgtcctctggcttgggttaattcttggatgacgtcggcgttgctgggagaatgtgccgttcctgccctgcctccacccacctcgggagcagaagcccggcctggacacccctcggcctggacacccctcgaaggagagggcgcttccttgagtaggtgggctccccttgcccttccctccctatcactccatactggggtgggctggaggaggccacaggccagctattgtaaaagctttttattttagtaaaatatacagaagttctttttctgaaaa

SEQ ID NO: 690 - protein, 502 aa, Homo sapiens
MSCPVPACCALLLVLGLCRARPRNALLLLADDGGFESGAYNNSAIATPHLDALARRSLLFRNAFTSVSSCSPSRASLLTGLPQHQNGMYGLHQDVHHFNSFDKVRSLPLLLSQAGVRTGIIGKKHVGPETVYPFDFAYTEENGSVLQVGRNITRIKLLVRKFLQTQDDRPFFLYVAFHDPHRCGHSQPQYGTFCEKFGNGESGMGRIPDWTPQAYDPLDVLVPYFVPNTPAARADLAAQYTTVGRMDQGVGLVLQELRDAGVLNDTLVIFTSDNGIPFPSGRTNLYWPGTAEPLLVSSPEHPKRWGQVSEAYVSLLDLTPTILDWFSIPYPSYAIFGSKTIHLTGRSLLPALEAEPLWATVFGSQSHHEVTMSYPMRSVQHRHFRLVHNLNFKMPFPIDQDFYVSPTFQDLLNRTTAGQPTGWYKDLRHYYYRARWELYDRSRDPHETQNLATDPRFAQLLEMLRDQLAKWQWETHDPWVCAPDGVLEEKLSPQCQPLHNEL

SEQ ID NO: 691 - DNA, 938 bp, Homo sapiens
  CDS (137)..(580)
gttgactaagtcaataatcagaatcagcaggtttgcagtcagattggcagggataagcagcctagctcaggagaagtgagtataaaagccccaggctgggagcagccatcacagaagtccactcattcttggcaggatggcttctcatcgtctgctcctcctctgccttgctggactggtatttgtgtctgaggctggccctacgggcaccggtgaatccaagtgtcctctgatggtcaaagttctagatgctgtccgaggcagtcctgccatcaatgtggccgtgcatgtgttcagaaaggctgctgatgacacctgggagccatttgcctctgggaaaaccagtgagtctggagagctgcatgggctcacaactgaggaggaatttgtagaagggatatacaaagtggaaatagacaccaaatcttactggaaggcacttggcatctccccattccatgagcatgcagaggtggtattcacagccaacgactccggcccccgccgctacaccattgccgccctgctgagcccctactcctattccaccacggctgtcgtcaccaatcccaaggaatgagggacttctcctccagtggacctgaaggacgagggatgggatttcatgtaaccaagagtattccatttttactaaagcagtgttttcacctcatatgctatgttagaagtccaggcagagacaataaaacattcctgtgaaaggcacttttcattccactttaacttgattttttaaattcccttattgtcccttccaaaaaaaagagaatcaaaattttacaaagaatcaaaggaattctagaaagtatctgggcagaacgctaggagagatccaaatttccattgtcttgcaagcaaagcacgtattaaatatgatctgcagccattaaaaagacacattctgtaaaaaaaaaaaa

SEQ ID NO: 692 - protein, 147 aa, Homo sapiens
MASHRLLLLCLAGLVFVSEAGPTGTGESKCPLMVKVLDAVRGSPAINVAVHVFRKAADDTWEPFASGKTSESGELHGLTTEEEFVEGIYKVEIDTKSYWKALGISPFHEHAEVVFTANDSGPRRYTIAALLSPYSYSTTAVVTNPKE

SEQ ID NO: 693 - DNA, 2053 bp, Homo sapiens
  CDS (530)..(1213)
caggcagcaggcagcaggcgggcgcgctgtggctccgcgccgcgcggtccgggctctgttcattcatgattggtactcggccctccgagacccagcccgagcgcagggaggggagccgagtgtgcggcaggaggggcgggcggacggcggctcccgcaccgcacgcggcgctggctcggcagcctcggccgggcggccgctctggccccgtgtccagtgccaggcaggcttcagggcaccgtcctcggccctgggcgagggaaccgccgggccgggtcctcgcgcggggaagcggttccgaaggctcgcggggagcggctagccctgagtccctgcatgtgcggggctgaagaaggaagccagaagcctcctagcctcgcctccacgcttgctgaataccaagctgcaggcgagctgccgggcgcttttctctcctccaattcagagtagacaaaccacggggatttctttccagggtaggggaggggccgggcccggggtcccaactcgcactcaagtcttcgctgccatgggggccgtcatgggcaccttctcatctctgcaaaccaaacaaaggcgaccctcgaaagacatcgcctggtggtattaccagtatcagagagataagattgaagatgagctggagatgaccatggtttgccatcggcccgagggactggagcagctcgaggcccagaccaacttcaccaagagggagctgcaggtcctttatcgaggcttcaaaaatgagtgccccagtggtgtggtcaacgaagacacattcaagcagatctatgctcagtttttccctcatggagatgccagcacgtatgcccattacctcttcaatgccttcgacaccactcagacaggctccgtgaagttcgaggactttgtaaccgctctgtcgattttattgagaggaactgtccacgagaaactaaggtggacatttaatttgtatgacatcaacaaggacggatacataaacaaagaggagatgatggacattgtcaaagccatctatgacatgatggggaaatacacatatcctgtgctcaaagaggacactccaaggcagcatgtggacgtcttcttccagaaaatggacaaaaataaagatggcatcgtaactttagatgaatttcttgaatcatgtcaggaggacgacaacatcatgaggtctctccagctgtttcaaaatgtcatgtaactggtgacactcagccattcagctctcagagacattgtactaaacaaccaccttaacaccctgatctgcccttgttctgattttacacaccaactcttgggacagaaacaccttttacactttggaagaattctctgctgaagactttctatggaacccagcatcatgtggctcagtctctgattgccaactcttcctctttcttcttcttgagagagacaagatgaaatttgagtttgttttggaagcatgctcatctcctcacactgctgccctatggaaggtccctctgcttaagcttaaacagtagtgcacaaaatatgctgcttacgtgcccccagcccactgcctccaagtcaggcagaccttggtgaatctggaagcaagaggacctgagccagatgcacaccatctctgatggcctcccaaaccaatgtgcctgtttctcttcctttggtgggaagaatgagagttatccagaacaattaggatctgtcatgaccagattgggagagccagcacctaacatatgtgggataggactgaattattaagcatgatattgtctgatgacccaaactgcccatgtcatttgtttccagaaacgaggaccaataattctctcacactggcatttgtgctggtagtacaagtcctttaatatgtccaggaagggagccattgcccagtggtccatatctccaccacatcccctgcttgagcccagcgctgcatgtccctcccaagaagtccagaatgcctgcaaattgctgtaattttataccatgttctaaccaataaacagaactatttcttacactctcaaaaaaaaaaaaaaaa

SEQ ID NO: 694 - protein, 227 aa, Homo sapiens
MGAVMGTFSSLQTKQRRPSKDIAWWYYQYQRDKIEDELEMTMVCHRPEGLEQLEAQTNFTKRELQVLYRGFKNECPSGVVNEDTFKQIYAQFFPHGDASTYAHYLFNAFDTTQTGSVKFEDFVTALSILLRGTVHEKLRWTFNLYDINKDGYINKEEMMDIVKAIYDMMGKYTYPVLKEDTPRQHVDVFFQKMDKNKDGIVTLDEFLESCQEDDNIMRSLQLFQNVM

SEQ ID NO: 695 - DNA, 1728 bp, Homo sapiens
  CDS (282)..(1154)
ggccttgtggtctcatcgcgcgcaggatccgggccgggcgggggcgggggcggggcgcgtccgcggaggggggcggttggcggctcccgagcccagcgccgcgctcagtccggaccccgtgaccggcggccgaggccccgcctccgtcagtctgtccttcgggtcctcagcacagccgtgccgcccttcctagggtgtggagagcgggccccgccctgaaggggcaccgtgggctggggggcctgttttggagcaggcaccggtggccgagctccgtgaccatgaaggtcaaggtcatccccgtgctcgaggacaactacatgtacctggtcatcgaggagctcacgcgcgaggcggtggccgtggacgtggctgtgcccaagaggctgctggagatcgtgggccgggagggggtgtctctgaccgctgtgctgaccacccaccatcactgggaccacgcgcggggaaacccggagctggcgcggcttcgtcccgggctggcggtgctgggcgcggacgagcgcatcttctcgctgacgcgcaggctggcgcacggcgaggagctgcggttcggggccatccacgtgcgttgcctcctgacgcccggccacaccgccggccacatgagctacttcctgtgggaggacgattgcccggacccacccgccctgttctcgggcgacgcgctgtcggtggccggctgcggctcgtgcctggagggcagcgcccagcagatgtaccagagcctggccgagctgggtaccctgccccccgagacgaaggtgttctgcggccacgagcacacgcttagcaacctggagtttgcccagaaagtggagccctgcaacgaccacgtgagagccaagctgtcctgggctaaggcacggcccctttcccgccgcggcaagagggtggggggggagggaacaggcttcggggtggggggggctctcagacaaggcctaatggtgaccggggcctgtggtcactccagaagagggatgaggatgacgtgcccactgtgccgtcgactctgggcgaggagcgcctctacaaccccttcctgcgggtggcgtgagtatggctgttgtcccggggcctccaccgttacgtggacccttaggaaggcatctggggactgcgtgttgggctgagtgagcatctctggcttgggggaggctgctcattaagtgcctgcctgcccgcccacccctcggcgccatgctcccgcgtgggcagcgggccctgcgcctcactgcacccctccctgcagagaggagccggtgcgcaagttcacgggcaaggcggtccccgccgacgtcctggaggcgctatgcaaggagcgggcgcgcttcgaacaggcgggcgagccgcggcagccacaggcgcgggccctccttgcgctgcagtgggggctcctgagtgcagccccacacgactgagccacccagaccctcacagggctggggcctgcgtccctcctcgtgacctcggccagctggacccacatgagggccacctctggaaccttcttcgaggccctggccagccatctgcccagcctcggagggtgggcaacctggtgcttcccgggtggacacacaggaccactcagtggggcctgtgtgggcgccgagacctgggtgtctgggaagtggggcacacggggcctccgaactatgaataaagctttgaaaggccaaaaaaaaaaaaaaaaaaaaaaaaaaa

SEQ ID NO: 696 - protein, 290 aa, Homo sapiens
MKVKVIPVLEDNYMYLVIEELTREAVAVDVAVPKRLLEIVGREGVSLTAVLTTHHHWDHARGNPELARLRPGLAVLGADERIFSLTRRLAHGEELRFGAIHVRCLLTPGHTAGHMSYFLWEDDCPDPPALFSGDALSVAGCGSCLEGSAQQMYQSLAELGTLPPETKVFCGHEHTLSNLEFAQKVEPCNDHVRAKLSWAKARPLSRRGKRVGGEGTGFGVGGALRQGLMVTGACGHSRRGMRMTCPLCRRLWARSASTTPSCGWREYGCCPGASTVTWTLRKASGDCVLG

SEQ ID NO: 697 - DNA, 1941 bp, Homo sapiens
  CDS (105)..(1223)
gagagggcgaaggtaggctggcagatacgttcgtcagcttgctcctttctgcccgtggacgccgccgaagaagcatcgttaaagtctctcttcaccctgccgtcatgtctaagtcagagtctcctaaagagcccgaacagctgaggaagctcttcattggagggttgagctttgaaacaactgatgagagcctgaggagccattttgagcaatggggaacgctcacggactgtgtggtaatgagagatccaaacaccaagcgctccaggggctttgggtttgtcacatatgccactgtggaggaggtggatgcagctatgaatgcaaggccacacaaggtggatggaagagttgtggaaccaaagagagctgtctccagagaagattctcaaagaccaggtgcccacttaactgtgaaaaagatatttgttggtggcattaaagaagacactgaagaacatcacctaagagattattttgaacagtatggaaaaattgaagtgattgaaatcatgactgaccgaggcagtggcaagaaaaggggctttgcctttgtaacctttgacgaccatgactccgtggataagattgtcattcagaaataccatactgtgaatggccacaactgtgaagttagaaaagccctgtcaaagcaagagatggctagtgcttcatccagccaaagaggtcgaagtggttctggaaactttggtggtggtcgtggaggtggtttcggtgggaatgacaacttcggtcgtggaggaaacttcagtggtcgtggtggctttggtggcagccgtggtggtggtggatatggtggcagtggggatggctataatggatttggtaatgatggtggttatggaggaggcggccctggttactctggaggaagcagaggctatggaagtggtggacagggttatggaaaccagggcagtggctatggcgggagtggcagctatgacagctataacaacggaggcggaggcggctttggcggtggtagtggaagcaattttggaggtggtggaagctacaatgattttgggaattacaacaatcagtcttcaaattttggacccatgaagggaggaaattttggaggcagaagctctggcccctatggcggtggaggccaatactttgcaaaaccacgaaaccaaggtggctatggcggttccagcagcagcagtagctatggcagtggcagaagattttaattaggaaacaaagcttagcaggagaggagagccagagaagtgacagggaagctacaggttacaacagatttgtgaactcagccaagcacagtggtggcagggcctagctgctacaaagaagacatgttttagacaaatactcatgtgtatgggcaaaaaactcgaggactgtatttgtgactaattgtataacaggttattttagtttctgttctgtggaaagtgtaaagcattccaacaaagggttttaatgtagatttttttttttgcaccccatgctgttgattgctaaatgtaacagtctgatcgtgacgctgaataaatgtcttttttttaatgtgctgtgtaaagttagtctactcttaagccatcttggtaaatttccccaacagtgtgaagttagaattccttcagggtgatgccaggttctatttggaatttatatacaacctgcttgggtggagaagccattgtcttcggaaaccttggtgtagttgaactgatagttactgttgtgacctgaagttcaccattaaaagggattacccaagcaaaatcatggaatggttataaaagtgattgttggcacatcctatgcaatatatctaaattgaataatggtaccagataaaattatagatgggaatgaagcttgtgtatccattatcatgtgtaatcaataaacgatttaattctcttgaaaaaaaaaaaaaaaaaa

SEQ ID NO: 698 - protein, 372 aa, Homo sapiens
MSKSESPKEPEQLRKLFIGGLSFETTDESLRSHFEQWGTLTDCVVMRDPNTKRSRGFGFVTYATVEEVDAAMNARPHKVDGRVVEPKRAVSREDSQRPGAHLTVKKIFVGGIKEDTEEHHLRDYFEQYGKIEVIEIMTDRGSGKKRGFAFVTFDDHDSVDKIVIQKYHTVNGHNCEVRKALSKQEMASASSSQRGRSGSGNFGGGRGGGFGGNDNFGRGGNFSGRGGFGGSRGGGGYGGSGDGYNGFGNDGGYGGGGPGYSGGSRGYGSGGQGYGNQGSGYGGSGSYDSYNNGGGGGFGGGSGSNFGGGGSYNDFGNYNNQSSNFGPMKGGNFGGRSSGPYGGGGQYFAKPRNQGGYGGSSSSSSYGSGRRF

SEQ ID NO: 699 - DNA, 12057 bp, Homo sapiens
  CDS (320)..(10510)
acagtgatataatgatgatgggtgtcacaacccgcatttgaacttgcaggcgagctgccccgagcctttctggggaagaactccaggcgtgcggacgcaacagccgagaacattaggtgttgtggacaggagctgggaccaagatcttcggccagccccgcatcctcccgcatcttccagcaccgtcccgcaccctccgcatccttccccgggccaccacgcttcctatgtgacccgcctgggcaacgccgaacccagtcgcgcagcgctgcagtgaattttccccccaaactgcaataagccgccttccaaggccaagatgttcataaatataaagagcatcttatggatgtgttcaaccttaatagtaacccatgcgctacataaagtcaaagtgggaaaaagcccaccggtgaggggctccctctctggaaaagtcagcctaccttgtcatttttcaacgatgcctactttgccacccagttacaacaccagtgaatttctccgcatcaaatggtctaagattgaagtggacaaaaatggaaaagatttgaaagagactactgtccttgtggcccaaaatggaaatatcaagattggtcaggactacaaagggagagtgtctgtgcccacacatcccgaggctgtgggcgatgcctccctcactgtggtcaagctgctggcaagtgatgcgggtctttaccgctgtgacgtcatgtacgggattgaagacacacaagacacggtgtcactgactgtggatggggttgtgtttcactacagggcggcaaccagcaggtacacactgaattttgaggctgctcagaaggcttgtttggacgttggggcagtcatagcaactccagagcagctctttgctgcctatgaagatggatttgagcagtgtgacgcaggctggctggctgatcagactgtcagatatcccatccgggctcccagagtaggctgttatggagataagatgggaaaggcaggagtcaggacttatggattccgttctccccaggaaacttacgatgtgtattgttatgtggatcatctggatggtgatgtgttccacctcactgtccccagtaaattcaccttcgaggaggctgcaaaagagtgtgaaaaccaggatgccaggctggcaacagtgggggaactccaggcggcatggaggaacggctttgaccagtgcgattacgggtggctgtcggatgccagcgtgcgccaccctgtgactgtggccagggcccagtgtggaggtggtctacttggggtgagaaccctgtatcgttttgagaaccagacaggcttccctccccctgatagcagatttgatgcctactgctttaaacctaaagaggctacaaccatcgatttgagtatcctcgcagaaactgcatcacccagtttatccaaagaaccacaaatggtttctgatagaactacaccaatcatccctttagttgatgaattacctgtcattccaacagagttccctcccgtgggaaatattgtcagttttgaacagaaagccacagtccaacctcaggctatcacagatagtttagccaccaaattacccacacctactggcagtaccaagaagccctgggatatggatgactactcaccttctgcttcaggacctcttggaaagctagacatatcagaaattaaggaagaagtgctccagagtacaactggcgtctctcattatgctacggattcatgggatggtgtcgtggaagataaacaaacacaagaatcggttacacagattgaacaaatagaagtgggtcctttggtaacatctatggaaatcttaaagcacattccttccaaggaattccctgtaactgaaacaccattggtaactgcaagaatgatcctggaatccaaaactgaaaagaaaatggtaagcactgtttctgaattggtaaccacaggtcactatggattcaccttgggagaagaggatgatgaagacagaacacttacagttggatctgatgagagcaccttgatctttgaccaaattcctgaagtcattacggtgtcaaagacttcagaagacaccatccacactcatttagaagacttggagtcagtctcagcatccacaactgtttcccctttaattatgcctgataataatggatcatccatggatgactgggaagagagacaaactagtggtaggataacggaagagtttcttggcaaatatctgtctactacaccttttccatcacagcatcgtacagaaatagaattgtttccttattctggtgataaaatattagtagagggaatttccacagttatttatccttctctacaaacagaaatgacacatagaagagaaagaacagaaacactaataccagagatgagaacagatacttatacagatgaaatacaagaagagatcactaaaagtccatttatgggaaaaacagaagaagaagtcttctctgggatgaaactctctacatctctctcagagccaattcatgttacagagtcttctgtggaaatgaccaagtcttttgatttcccaacattgataacaaagttaagtgcagagccaacagaagtaagagatatggaggaagactttacagcaactccaggtactacaaaatatgatgaaaatattacaacagtgcttttggcccatggtactttaagtgttgaagcagccactgtatcaaaatggtcatgggatgaagataatacaacatccaagcctttagagtctacagaaccttcagcctcttcaaaattgccccctgccttactcacaactgtggggatgaatggaaaggataaagacatcccaagtttcactgaagatggagcagatgaatttactcttattccagatagtactcaaaagcagttagaggaggttactgatgaagacatagcagcccatggaaaattcacaattagatttcagccaactacatcaactggtattgcagaaaagtcaactttgagagattctacaactgaagaaaaagttccacctatcacaagcactgaaggccaagtttatgcaaccatggaaggaagtgctttgggtgaagtagaagatgtggacctctctaagccagtatctactgttccccaatttgcacacacttcagaggtggaaggattagcatttgttagttatagtagcacccaagagcctactacttatgtagactcttcccataccattcctctttctgtaattcccaagacagactggggagtgttagtaccttctgttccatcagaagatgaagttctaggtgaaccctctcaagacatacttgtcattgatcagactcgccttgaagcgactatttctccagaaactatgagaacaacaaaaatcacagagggaacaactcaggaagaattcccttggaaagaacagactgcagagaaaccagttcctgctctcagttctacagcttggactcccaaggaggcagtaacaccactggatgaacaagagggcgatggatcagcatatacagtctctgaagatgaattgttgacaggttctgagagggtcccagttttagaaacaactccagttggaaaaattgatcacagtgtgtcttatccaccaggtgctgtaactgagcacaaagtgaaaacagatgaagtggtaacactaacaccacgcattgggccaaaagtatctttaagtccagggcctgaacaaaaatatgaaacagaaggtagtagtacaacaggatttacatcatctttgagtccttttagtacccacattacccagcttatggaagaaaccactactgagaaaacatccctagaggatattgatttaggctcaggattatttgaaaagcccaaagccacagaactcatagaattttcaacaatcaaagtcacagttccaagtgatattaccactgccttcagttcagtagacagacttcacacaacttcagcattcaagccatcttccgcgatcactaagaaaccacctctcatcgacagggaacctggtgaagaaacaaccagtgacatggtaatcattggagaatcaacatctcatgttcctcccactacccttgaagatattgtagccaaggaaacagaaaccgatattgatagagagtatttcacgacttcaagtcctcctgctacacagccaacaagaccacccactgtggaagacaaagaggcctttggacctcaggcgctttctacgccacagcccccagcaagcacaaaatttcaccctgacattaatgtttatattattgaggtcagagaaaataagacaggtcgaatgagtgatttgagtgtaattggtcatccaatagattcagaatctaaagaagatgaaccttgtagtgaagaaacagatccagtgcatgatctaatggctgaaattttacctgaattccctgacataattgaaatagacctataccacagtgaagaaaatgaagaagaagaagaagagtgtgcaaatgctactgatgtgacaaccaccccatctgtgcagtacataaatgggaagcatctcgttaccactgtgcccaaggacccagaagctgcagaagctaggcgtggccagtttgaaagtgttgcaccttctcagaatttctcggacagctctgaaagtgatactcatccatttgtaatagccaaaacggaattgtctactgctgtgcaacctaatgaatctacagaaacaactgagtctcttgaagttacatggaagcctgagacttaccctgaaacatcagaacatttttcaggtggtgagcctgatgttttccccacagtcccattccatgaggaatttgaaagtggaacagccaaaaaaggggcagaatcagtcacagagagagatactgaagttggtcatcaggcacatgaacatactgaacctgtatctctgtttcctgaagagtcttcaggagagattgccattgaccaagaatctcagaaaatagcctttgcaagggctacagaagtaacatttggtgaagaggtagaaaaaagtacttctgtcacatacactcccactatagttccaagttctgcatcagcatatgtttcagaggaagaagcagttaccctaataggaaatccttggccagatgacctgttgtctaccaaagaaagctgggtagaagcaactcctagacaagttgtagagctctcagggagttcttcgattccaattacagaaggctctggagaagcagaagaagatgaagatacaatgttcaccatggtaactgatttatcacagagaaatactactgatacactcattactttagacactagcaggataatcacagaaagcttttttgaggttcctgcaaccaccatttatccagtttctgaacaaccttctgcaaaagtggtgcctaccaagtttgtaagtgaaacagacacttctgagtggatttccagtaccactgttgaggaaaagaaaaggaaggaggaggagggaactacaggtacggcttctacatttgaggtatattcatctacacagagatcggatcaattaattttaccctttgaattagaaagtccaaatgtagctacatctagtgattcaggtaccaggaaaagttttatgtccttgacaacaccaacacagtctgaaagggaaatgacagattctactcctgtctttacagaaacaaatacattagaaaatttgggggcacagaccactgagcacagcagtatccatcaacctggggttcaggaagggctgaccactctcccacgtagtcctgcctctgtctttatggagcagggctctggagaagctgctgccgacccagaaaccaccactgtttcttcattttcattaaacgtagagtatgcaattcaagccgaaaaggaagtagctggcactttgtctccgcatgtggaaactacattctccactgagccaacaggactggttttgagtacagtaatggacagagtagttgctgaaaatataacccaaacatccagggaaatagtgatttcagagcgattaggagaaccaaattatggggcagaaataaggggcttttccacaggttttcctttggaggaagatttcagtggtgactttagagaatactcaacagtgtctcatcccatagcaaaagaagaaacggtaatgatggaaggctctggagatgcagcatttagggacacccagacttcaccatctacagtacctacttcagttcacatcagtcacatatctgactcagaaggacccagtagcaccatggtcagcacttcagccttcccctgggaagagtttacatcctcagctgagggctcaggtgagcaactggtcacagtcagcagctctgttgttccagtgcttcccagtgctgtgcaaaagttttctggtacagcttcctccattatcgacgaaggattgggagaagtgggtactgtcaatgaaattgatagaagatccaccattttaccaacagcagaagtggaaggtacgaaagctccagtagagaaggaggaagtaaaggtcagtggcacagtttcaacaaactttccccaaactatagagccagccaaattatggtctaggcaagaagtcaaccctgtaagacaagaaattgaaagtgaaacaacatcagaggaacaaattcaagaagaaaagtcatttgaatcccctcaaaactctcctgcaacagaacaaacaatctttgattcacagacatttactgaaactgaactcaaaaccacagattattctgtactaacaacaaagaaaacttacagtgatgataaagaaatgaaggaggaagacacttctttagttaacatgtctactccagatccagatgcaaatggcttggaatcttacacaactctccctgaagctactgaaaagtcacattttttcttagctactgcattagtaactgaatctataccagctgaacatgtagtcacagattcaccaatcaaaaaggaagaaagtacaaaacattttccgaaaggcatgagaccaacaattcaagagtcagatactgagctcttattctctggactgggatcaggagaagaagttttacctactctaccaacagagtcagtgaattttactgaagtggaacaaatcaataacacattatatccccacacttctcaagtggaaagtacctcaagtgacaaaattgaagactttaacagaatggaaaatgtggcaaaagaagttggaccactcgtatctcaaacagacatctttgaaggtagtgggtcagtaaccagcacaacattaatagaaattttaagtgacactggagcagaaggacccacggtggcacctctccctttctccacggacatcggacatcctcaaaatcagactgtcaggtgggcagaagaaatccagactagtagaccacaaaccataactgaacaagactctaacaagaattcttcaacagcagaaattaacgaaacaacaacctcatctactgattttctggctagagcttatggttttgaaatggccaaagaatttgttacatcagcaccaaaaccatctgacttgtattatgaaccttctggagaaggatctggagaagtggatattgttgattcatttcacacttctgcaactactcaggcaaccagacaagaaagcagcaccacatttgtttctgatgggtccctggaaaaacatcctgaggtgccaagcgctaaagctgttactgctgatggattcccaacagtttcagtgatgctgcctcttcattcagagcagaacaaaagctcccctgatccaactagcacactgtcaaatacagtgtcatatgagaggtccacagacggtagtttccaagaccgtttcagggaattcgaggattccaccttaaaacctaacagaaaaaaacccactgaaaatattatcatagacctggacaaagaggacaaggatttaatattgacaattacagagagtaccatccttgaaattctacctgagctgacatcggataaaaatactatcatagatattgatcatactaaacctgtgtatgaagacattcttggaatgcaaacagatatagatacagaggtaccatcagaaccacatgacagtaatgatgaaagtaatgatgacagcactcaagttcaagagatctatgaggcagctgtcaacctttctttaactgaggaaacatttgagggctctgctgatgttctggctagctacactcaggcaacacatgatgaatcaatgacttatgaagatagaagccaactagatcacatgggctttcacttcacaactgggatccctgctcctagcacagaaacagaattagacgttttacttcccacggcaacatccctgccaattcctcgtaagtctgccacagttattccagagattgaaggaataaaagctgaagcaaaagccctggatgacatgtttgaatcaagcactttgtctgatggtcaagctattgcagaccaaagtgaaataataccaacattgggccaatttgaaaggactcaggaggagtatgaagacaaaaaacatgctggtccttcttttcagccagaattctcttcaggagctgaggaggcattagtagaccatactccctatctaagtattgctactacccaccttatggatcagagtgtaacagaggtgcctgatgtgatggaaggatccaatcccccatattacactgatacaacattagcagtttcaacatttgcgaagttgtcttctcagacaccatcatctcccctcactatctactcaggcagtgaagcctctggacacacagagatcccccagcccagtgctctgccaggaatagacgtcggctcatctgtaatgtccccacaggattcttttaaggaaattcatgtaaatattgaagcgactttcaaaccatcaagtgaggaataccttcacataactgagcctccctctttatctcctgacacaaaattagaaccttcagaagatgatggtaaacctgagttattagaagaaatggaagcttctcccacagaacttattgctgtggaaggaactgagattctccaagatttccaaaacaaaaccgatggtcaagtttctggagaagcaatcaagatgtttcccaccattaaaacacctgaggctggaactgttattacaactgccgatgaaattgaattagaaggtgctacacagtggccacactctacttctgcttctgccacctatggggtcgaggcaggtgtggtgccttggctaagtccacagacttctgagaggcccacgctttcttcttctccagaaataaaccctgaaactcaagcagctttaatcagagggcaggattccacgatagcagcatcagaacagcaagtggcagcgagaattcttgattccaatgatcaggcaacagtaaaccctgtggaatttaatactgaggttgcaacaccaccattttcccttctggagacttctaatgaaacagatttcctgattggcattaatgaagagtcagtggaaggcacggcaatctatttaccaggacctgatcgctgcaaaatgaacccgtgccttaacggaggcacctgttatcctactgaaacttcctacgtatgcacctgtgtgccaggatacagcggagaccagtgtgaacttgattttgatgaatgtcactctaatccctgtcgtaatggagccacttgtgttgatggttttaacacattcaggtgcctctgccttccaagttatgttggtgcactttgtgagcaagataccgagacatgtgactatggctggcacaaattccaagggcagtgctacaaatactttgcccatcgacgcacatgggatgcagctgaacgggaatgccgtctgcagggtgcccatctcacaagcatcctgtctcacgaagaacaaatgtttgttaatcgtgtgggccatgattatcagtggataggcctcaatgacaagatgtttgagcatgacttccgttggactgatggcagcacactgcaatacgagaattggagacccaaccagccagacagcttcttttctgctggagaagactgtgttgtaatcatttggcatgagaatggccagtggaatgatgttccctgcaattaccatctcacctatacgtgcaagaaaggaacagtcgcttgcggccagccccctgttgtagaaaatgccaagacctttggaaagatgaaacctcgttatgaaatcaactccctgattagataccactgcaaagatggtttcattcaacgtcaccttccaactatccggtgcttaggaaatggaagatgggctatacctaaaattacctgcatgaacccatctgcataccaaaggacttattctatgaaatactttaaaaattcctcatcagcaaaggacaattcaataaatacatccaaacatgatcatcgttggagccggaggtggcaggagtcgaggcgctgatccctaaaatggcgaacatgtgttttcatcatttcagccaaagtcctaacttcctgtgcctttcctatcacctcgagaagtaattatcagttggtttggatttttggaccaccgttcagtcattttgggttgccgtgctcccaaaacattttaaatgaaagtattggcattcaaaaagacagcagacaaaatgaaagaaaatgagagcagaaagtaagcatttccagcctatctaatttctttagttttctatttgcctccagtgcagtccatttcctaatgtataccagcctactgtactatttaaaatgctcaatttcagcaccgatggccatgtaaataagatgatttaatgttgattttaatcctgtatataaaataaaaagtcacaatgagtttgggcatatttaatgatgattatggagccttagaggtctttaatcattggttcggctgcttttatgtagtttaggctggaaatggtttcacttgctctttgactgtcagcaagactgaagatggcttttcctggacagctagaaaacacaaaatcttgtaggtcattgcacctatctcagccataggtgcagtttgcttctacatgatgctaaaggctgcgaatgggatcctgatggaactaaggactccaatgtcgaactcttctttgctgcattcctttttcttcacttacaagaaaggcctgaatggaggacttttctgtaaccaggaacattttttaggggtcaaagtgctaataattaactcaaccaggtctactttttaatggctttcataacactaactcataaggttaccgatcaatgcatttcatacggatatagacctagggctctggagggtgggggattgttaaaacacatgcaaaaaaaaaaaaaaaaaaaaaaaaagaaattttgtatatataaccattttaatcttttataaagttttgaatgttcatgtatgaatgctgcagctgtgaagcatacataaataaatgaagtaagccatactgatttaatttattggatgttattttccctaagacctgaaaatgaacatagtatgctagttatttttcagtgttagccttttactttcctcacacaatttggaatcatataatataggtactttgtccctgattaaataatgtgacggatagaatgcatcaagtgtttattatgaaaagagtggaaaagtatatagcttttagcaaaaggtgtttgcccattctaagaaatgagcgaatatatagaaatagtgtgggcatttcttcctgttaggtggagtgtatgtgttgacatttctccccatctcttcccactctgttttctccccattatttgaataaagtgactgctgaagatgactttgaatccttatccacttaatttaatgtttaaagaaaaacctgtaatggaaagtaagactccttccctaatttcagtttagagcaacttgaagaagagtagacaaaaaataaaatgcacatagaaaaagagaaaaagggcacaaagggattggcccaatattgattctttttt

SEQ ID NO: 700 - protein, 3396 aa, Homo sapiens
MFINIKSILWMCSTLIVTHALHKVKVGKSPPVRGSLSGKVSLPCHFSTMPTLPPSYNTSEFLRIKWSKIEVDKNGKDLKETTVLVAQNGNIKIGQDYKGRVSVPTHPEAVGDASLTVVKLLASDAGLYRCDVMYGIEDTQDTVSLTVDGVVFHYRAATSRYTLNFEAAQKACLDVGAVIATPEQLFAAYEDGFEQCDAGWLADQTVRYPIRAPRVGCYGDKMGKAGVRTYGFRSPQETYDVYCYVDHLDGDVFHLTVPSKFTFEEAAKECENQDARLATVGELQAAWRNGFDQCDYGWLSDASVRHPVTVARAQCGGGLLGVRTLYRFENQTGFPPPDSRFDAYCFKPKEATTIDLSILAETASPSLSKEPQMVSDRTTPIIPLVDELPVIPTEFPPVGNIVSFEQKATVQPQAITDSLATKLPTPTGSTKKPWDMDDYSPSASGPLGKLDISEIKEEVLQSTTGVSHYATDSWDGVVEDKQTQESVTQIEQIEVGPLVTSMEILKHIPSKEFPVTETPLVTARMILESKTEKKMVSTVSELVTTGHYGFTLGEEDDEDRTLTVGSDESTLIFDQIPEVITVSKTSEDTIHTHLEDLESVSASTTVSPLIMPDNNGSSMDDWEERQTSGRITEEFLGKYLSTTPFPSQHRTEIELFPYSGDKILVEGISTVIYPSLQTEMTHRRERTETLIPEMRTDTYTDEIQEEITKSPFMGKTEEEVFSGMKLSTSLSEPIHVTESSVEMTKSFDFPTLITKLSAEPTEVRDMEEDFTATPGTTKYDENITTVLLAHGTLSVEAATVSKWSWDEDNTTSKPLESTEPSASSKLPPALLTTVGMNGKDKDIPSFTEDGADEFTLIPDSTQKQLEEVTDEDIAAHGKFTIRFQPTTSTGIAEKSTLRDSTTEEKVPPITSTEGQVYATMEGSALGEVEDVDLSKPVSTVPQFAHTSEVEGLAFVSYSSTQEPTTYVDSSHTIPLSVIPKTDWGVLVPSVPSEDEVLGEPSQDILVIDQTRLEATISPETMRTTKITEGTTQEEFPWKEQTAEKPVPALSSTAWTPKEAVTPLDEQEGDGSAYTVSEDELLTGSERVPVLETTPVGKIDHSVSYPPGAVTEHKVKTDEVVTLTPRIGPKVSLSPGPEQKYETEGSSTTGFTSSLSPFSTHITQLMEETTTEKTSLEDIDLGSGLFEKPKATELIEFSTIKVTVPSDITTAFSSVDRLHTTSAFKPSSAITKKPPLIDREPGEETTSDMVIIGESTSHVPPTTLEDIVAKETETDIDREYFTTSSPPATQPTRPPTVEDKEAFGPQALSTPQPPASTKFHPDINVYIIEVRENKTGRMSDLSVIGHPIDSESKEDEPCSEETDPVHDLMAEILPEFPDIIEIDLYHSEENEEEEEECANATDVTTTPSVQYINGKHLVTTVPKDPEAAEARRGQFESVAPSQNFSDSSESDTHPFVIAKTELSTAVQPNESTETTESLEVTWKPETYPETSEHFSGGEPDVFPTVPFHEEFESGTAKKGAESVTERDTEVGHQAHEHTEPVSLFPEESSGEIAIDQESQKIAFARATEVTFGEEVEKSTSVTYTPTIVPSSASAYVSEEEAVTLIGNPWPDDLLSTKESWVEATPRQVVELSGSSSIPITEGSGEAEEDEDTMFTMVTDLSQRNTTDTLITLDTSRIITESFFEVPATTIYPVSEQPSAKVVPTKFVSETDTSEWISSTTVEEKKRKEEEGTTGTASTFEVYSSTQRSDQLILPFELESPNVATSSDSGTRKSFMSLTTPTQSEREMTDSTPVFTETNTLENLGAQTTEHSSIHQPGVQEGLTTLPRSPASVFMEQGSGEAAADPETTTVSSFSLNVEYAIQAEKEVAGTLSPHVETTFSTEPTGLVLSTVMDRVVAENITQTSREIVISERLGEPNYGAEIRGFSTGFPLEEDFSGDFREYSTVSHPIAKEETVMMEGSGDAAFRDTQTSPSTVPTSVHISHISDSEGPSSTMVSTSAFPWEEFTSSAEGSGEQLVTVSSSVVPVLPSAVQKFSGTASSIIDEGLGEVGTVNEIDRRSTILPTAEVEGTKAPVEKEEVKVSGTVSTNFPQTIEPAKLWSRQEVNPVRQEIESETTSEEQIQEEKSFESPQNSPATEQTIFDSQTFTETELKTTDYSVLTTKKTYSDDKEMKEEDTSLVNMSTPDPDANGLESYTTLPEATEKSHFFLATALVTESIPAEHVVTDSPIKKEESTKHFPKGMRPTIQESDTELLFSGLGSGEEVLPTLPTESVNFTEVEQINNTLYPHTSQVESTSSDKIEDFNRMENVAKEVGPLVSQTDIFEGSGSVTSTTLIEILSDTGAEGPTVAPLPFSTDIGHPQNQTVRWAEEIQTSRPQTITEQDSNKNSSTAEINETTTSSTDFLARAYGFEMAKEFVTSAPKPSDLYYEPSGEGSGEVDIVDSFHTSATTQATRQESSTTFVSDGSLEKHPEVPSAKAVTADGFPTVSVMLPLHSEQNKSSPDPTSTLSNTVSYERSTDGSFQDRFREFEDSTLKPNRKKPTENIIIDLDKEDKDLILTITESTILEILPELTSDKNTIIDIDHTKPVYEDILGMQTDIDTEVPSEPHDSNDESNDDSTQVQEIYEAAVNLSLTEETFEGSADVLASYTQATHDESMTYEDRSQLDHMGFHFTTGIPAPSTETELDVLLPTATSLPIPRKSATVIPEIEGIKAEAKALDDMFESSTLSDGQAIADQSEIIPTLGQFERTQEEYEDKKHAGPSFQPEFSSGAEEALVDHTPYLSIATTHLMDQSVTEVPDVMEGSNPPYYTDTTLAVSTFAKLSSQTPSSPLTIYSGSEASGHTEIPQPSALPGIDVGSSVMSPQDSFKEIHVNIEATFKPSSEEYLHITEPPSLSPDTKLEPSEDDGKPELLEEMEASPTELIAVEGTEILQDFQNKTDGQVSGEAIKMFPTIKTPEAGTVITTADEIELEGATQWPHSTSASATYGVEAGVVPWLSPQTSERPTLSSSPEINPETQAALIRGQDSTIAASEQQVAARILDSNDQATVNPVEFNTEVATPPFSLLETSNETDFLIGINEESVEGTAIYLPGPDRCKMNPCLNGGTCYPTETSYVCTCVPGYSGDQCELDFDECHSNPCRNGATCVDGFNTFRCLCLPSYVGALCEQDTETCDYGWHKFQGQCYKYFAHRRTWDAAERECRLQGAHLTSILSHEEQMFVNRVGHDYQWIGLNDKMFEHDFRWTDGSTLQYENWRPNQPDSFFSAGEDCVVIIWHENGQWNDVPCNYHLTYTCKKGTVACGQPPVVENAKTFGKMKPRYEINSLIRYHCKDGFIQRHLPTIRCLGNGRWAIPKITCMNPSAYQRTYSMKYFKNSSSAKDNSINTSKHDHRWSRRWQESRR

SEQ ID NO: 701 - DNA, 2888 bp, Homo sapiens
  CDS (98)..(2635)
actagctgtcgctccacaggcgagcagggcaggcgtgcgggcgggtgggtggtggaggctgcgagggtgcacggccggccctgggcaggcggtagccatggagctgtggcgccaatgcacccactggctcatccagtgccgggtgctgccgcccagccaccgcgtgacctgggatggggctcaggtgtgtgaactggcccaggccctccgggatggtgtccttctgtgtcagctgcttaacaacctgctaccccatgccatcaacctgcgtgaggtcaacctgcgcccccagatgtcccagttcctgtgccttaagaacattagaaccttcctgtccacctgctgtgagaagttcggcctcaagcggagcgagctcttcgaagcctttgacctcttcgatgtgcaggattttggcaaggtcatctacaccctgtctgctctgtcctggaccccgatcgcccagaacagggggatcatgcccttccccaccgaggaggagagtgtaggtgatgaagacatctacagtggcctgtccgaccagatcgacgacacggtggaggaggatgaggacctgtatgactgcgtggagaatgaggaggcggaaggcgacgagatctatgaggacctcatgcgctcggagcccgtgtccatgccgcccaagatgacagagtatgacaagcgctgctgctgcctgcgggagatccagcagacggaggagaagtacactgacacgctgggctccatccagcagcatttcttgaagcccctgcaacggttcctgaaacctcaagacattgagatcatctttatcaacattgaggacctgcttcgtgttcatactcacttcctaaaggagatgaaggaagccctgggcacccctggcgcagccaatctctaccaggtcttcatcaaatacaaggagaggttcctcgtctatggccgctactgcagccaggtggagtcagccagcaaacacctggaccgtgtggccgcagcccgggaggacgtgcagatgaagctggaggaatgttctcagagagccaacaacgggaggttcaccctgcgggacctgctgatggtgcctatgcagcgagttctcaaatatcacctccttctccaggagctggtgaaacacacgcaggaggcgatggagaaggagaacctgcggctggccctggatgccatgagggacctggctcagtgcgtgaacgaggtcaagcgagacaacgagacactgcgacagatcaccaatttccagctgtccattgagaacctggaccagtctctggctcactatggccggcccaagatcgacggggaactcaagatcacctcggtggaacggcgctccaagatggacaggtatgccttcctgctcgacaaagctctactcatctgtaagcgcaggggagactcctatgacctcaaggactttgtaaacctgcacagcttccaggttcgggatgactcttcaggagaccgagacaacaagaagtggagccacatgttcctcctgatcgaggaccaaggtgcccagggctatgagctgttcttcaagacaagagaattgaagaagaagtggatggagcagtttgagatggccatctccaacatctatccggagaatgccaccgccaacgggcatgacttccagatgttctcctttgaggagaccacatcctgcaaggcctgtcagatgctgcttagaggtaccttctatcagggctaccgctgccatcggtgccgggcatctgcacacaaggagtgtctggggagggtccctccatgtggccgacatgggcaagatttcccaggaactatgaagaaggacaaactacatcgcagggctcaggacaaaaagaggaatgagctgggtctgcccaagatggaggtgtttcaggaatactacgggcttcctccaccccctggagccattggaccctttctacggctcaaccctggagacattgtggagctcacgaaggctgaggctgaacagaactggtgggagggcagaaatacatctactaatgaaattggctggtttccttgtaacagggtgaagccctatgtccatggccctcctcaggacctgtctgttcatctctggtacgcaggccccatggagcgggcaggggcagagagcatcctggccaaccgctcggacgggactttcttggtgcggcagagggtgaaggatgcagcagaatttgccatcagcattaaatataacgtcgaggtcaagcacattaaaatcatgacagcagaaggactgtaccggatcacagagaaaaaggctttccgggggcttacggagctggtggagttttaccagcagaactctctaaaggattgcttcaagtctctggacaccaccttgcagttccccttcaaggagcctgaaaagagaaccatcagcaggccagcagtgggaagcacaaagtattttggcacagccaaagcccgctatgacttctgcgcccgagaccgatcagagctgtcgctcaaggagggtgacatcatcaagatccttaacaagaagggacagcaaggctggtggcgaggggagatctatggccgggttggctggttccctgccaactacgtggaggaagattattctgaatactgctgagccctggtgccttggcagagagacgagaaactccaggctctgagcccggcgtgggcaggcagcggagccaggggctgtgacagctcccggcgggtggagactttgggatggactggaggagcgcagcgtccagctggcggtgctcccgggatgtgccctgacatggttaatttataacaccccgatttcctcttgggtcccctcaagcagacggggctcaagggggttacatttaataaaaggatgaagatgg

SEQ ID NO: 702 - protein, 845 aa, Homo sapiens
MELWRQCTHWLIQCRVLPPSHRVTWDGAQVCELAQALRDGVLLCQLLNNLLPHAINLREVNLRPQMSQFLCLKNIRTFLSTCCEKFGLKRSELFEAFDLFDVQDFGKVIYTLSALSWTPIAQNRGIMPFPTEEESVGDEDIYSGLSDQIDDTVEEDEDLYDCVENEEAEGDEIYEDLMRSEPVSMPPKMTEYDKRCCCLREIQQTEEKYTDTLGSIQQHFLKPLQRFLKPQDIEIIFINIEDLLRVHTHFLKEMKEALGTPGAANLYQVFIKYKERFLVYGRYCSQVESASKHLDRVAAAREDVQMKLEECSQRANNGRFTLRDLLMVPMQRVLKYHLLLQELVKHTQEAMEKENLRLALDAMRDLAQCVNEVKRDNETLRQITNFQLSIENLDQSLAHYGRPKIDGELKITSVERRSKMDRYAFLLDKALLICKRRGDSYDLKDFVNLHSFQVRDDSSGDRDNKKWSHMFLLIEDQGAQGYELFFKTRELKKKWMEQFEMAISNIYPENATANGHDFQMFSFEETTSCKACQMLLRGTFYQGYRCHRCRASAHKECLGRVPPCGRHGQDFPGTMKKDKLHRRAQDKKRNELGLPKMEVFQEYYGLPPPPGAIGPFLRLNPGDIVELTKAEAEQNWWEGRNTSTNEIGWFPCNRVKPYVHGPPQDLSVHLWYAGPMERAGAESILANRSDGTFLVRQRVKDAAEFAISIKYNVEVKHIKIMTAEGLYRITEKKAFRGLTELVEFYQQNSLKDCFKSLDTTLQFPFKEPEKRTISRPAVGSTKYFGTAKARYDFCARDRSELSLKEGDIIKILNKKGQQGWWRGEIYGRVGWFPANYVEEDYSEYC

SEQ ID NO: 703 - DNA, 2509 bp, Homo sapiens
  CDS (29)..(2344)
gtccatgtgagagaagctggctgctgaaatgactgcgaaccggcttgcagagagccttctggctttgagccaacaggaagaactagcggatttgccaaaagactacctcttgagtgagagtgaagatgagggggacaatgatggagagagaaagcatcaaaagcttctggaagcaatcagttcccttgatggaaagaataggcggaaattggctgagaggtctgaggctagtctgaaggtgtcagagttcaatgtcagttctgaaggatcaggagaaaagctggtccttgcagatctgcttgagcctgttaaaacttcatcttctttggccactgtgaaaaagcaactgagtagagtcaaatcaaagaagacagtggagttacctctgaacaaagaagagattgaacggatccacagagaagtagcattcaataaaaccgcacaagtcctctccaaatgggaccctgtcgtcctgaagaaccggcaggcagagcagctggtttttcccctggagaaagaggagccagccattgctcccattgaacatgtgctcagtggctggaaggcaagaactcccctggagcaggaaattttcaacctcctccataagaacaagcagccagtgacagaccctttactgacccctgtggaaaaggcctctctccgagccatgagcctagaagaggcaaagatgcgacgagcagagcttcagagggctcgggctctgcagtcctactatgaggccaaggctcgaagagagaagaaaatcaaaagtaaaaagtatcacaaagtcgtgaagaaaggaaaggccaagaaagccctaaaagagtttgagcagctgcggaaggttaatccagctgcagcactagaagaactggaaaaaattgaaaaggccagaatgatggaaagaatgagccttaagcaccaaaacagtgggaaatgggccaagtcaaaggcaattatggccaaatatgacctggaggctcgccaagctatgcaggaacagttgtctaagaacaaagaactgacacagaaactccaggtagcctctgagagtgaggaagaggagggaggcacagaagatgtggaagaactccttgtccctgatgtagtgaatgaagtgcagatgaatgcagatgggccgaatccctggatgctcaggagctgcaccagtgacaccaaagaggctgcaacccaggaggaccctgagcaactgccagagcttgaggcccatggagtttctgaaagtgagggagaagaaagaccagtggcagaagaagaaattttgttgagagaatttgaggaaaggcgatcccttagaaaaagatctgagctcagccaagatgctgagccagcaggcagtcaagaaacaaaagattctggcagccaggaggtgctgtctgaattgagagtactatctcagaaattgaaggaaaaccatcagtccaggaagcaaaaagcaagttcagaggggactattccccaggtccagagagaggaacctgccccagaagaagaggagcccctgttgctacagagaccagagagagtacagacgctggaagagctagaagagctgggaaaagaagaatgttttcaaaataaggagcttcccagacctgtgttagaagggcagcagtcagagaggaccccaaataatcgccctgatgcccctaaggagaagaaaaagaaggagcaaatgatcgacctacagaacctcctaaccacacaatctccctccgtgaagtctttggcagttcccacaatagaggagctggaagatgaagaggagagaaaccataggcagatgataaaggaagcttttgctggggatgatgtcatcagagatttcttgaaagagaagagggaagctgtggaggcgagtaagccaaaggacgtggacctgacactacctggctggggcgagtggggtggtgtgggcctaaagcccagtgccaagaaaagacgccggtttctcattaaagcccctgagggtcctccaagaaaagataagaatttgccaaatgtgattatcaatgagaagcgcaacatccacgcagctgctcatcaggtacgagtgcttccatatccatttacccaccattggcaatttgaaaggaccatccagacccccataggatccacatggaacacccagagggctttccaaaagctgactactcccaaggtcgtcaccaagccaggccatatcattaaccccataaaagcagaagacgtgggctaccggtcttcctcaaggtcggacctgtctgtcatacagaggaatccaaaacgaatcaccacacgtcacaaaaaacagctgaagaaatgctctgtagattgagttgctggaggagtgacagccaggagccctgacttcacttcctttggtccagttttactctgatacagggtggattccaaaactggctcagtacattgcatgtagttaagccacattttaaaaataaaggcattttttaatctaaaaaaaaaaaaaaaaaaaaaa

SEQ ID NO: 704 - protein, 771 aa, Homo sapiens
MTANRLAESLLALSQQEELADLPKDYLLSESEDEGDNDGERKHQKLLEAISSLDGKNRRKLAERSEASLKVSEFNVSSEGSGEKLVLADLLEPVKTSSSLATVKKQLSRVKSKKTVELPLNKEEIERIHREVAFNKTAQVLSKWDPVVLKNRQAEQLVFPLEKEEPAIAPIEHVLSGWKARTPLEQEIFNLLHKNKQPVTDPLLTPVEKASLRAMSLEEAKMRRAELQRARALQSYYEAKARREKKIKSKKYHKVVKKGKAKKALKEFEQLRKVNPAAALEELEKIEKARMMERMSLKHQNSGKWAKSKAIMAKYDLEARQAMQEQLSKNKELTQKLQVASESEEEEGGTEDVEELLVPDVVNEVQMNADGPNPWMLRSCTSDTKEAATQEDPEQLPELEAHGVSESEGEERPVAEEEILLREFEERRSLRKRSELSQDAEPAGSQETKDSGSQEVLSELRVLSQKLKENHQSRKQKASSEGTIPQVQREEPAPEEEEPLLLQRPERVQTLEELEELGKEECFQNKELPRPVLEGQQSERTPNNRPDAPKEKKKKEQMIDLQNLLTTQSPSVKSLAVPTIEELEDEEERNHRQMIKEAFAGDDVIRDFLKEKREAVEASKPKDVDLTLPGWGEWGGVGLKPSAKKRRRFLIKAPEGPPRKDKNLPNVIINEKRNIHAAAHQVRVLPYPFTHHWQFERTIQTPIGSTWNTQRAFQKLTTPKVVTKPGHIINPIKAEDVGYRSSSRSDLSVIQRNPKRITTRHKKQLKKCSVD

SEQ ID NO: 705 - DNA, 645 bp, Homo sapiens
  CDS (1)..(645)
atgagatgtgtggcagctgagacccgggaactgctcaagggcaccaggccccatctgtctgcactcactcaccttcctcagagcttttcggggagcaacttggcaagggggggtcccagcagctgctcgcgggccaggaaccatggggcacagccccgggcgaccctcgggccggcgggggccttccgcttcctggcgtctttcttccccgccccgccggctgctggggaagcggcgggcgcccagtgcctggaggtcgctccctcgcctcctctggctgcgggaacggagaggcggcggcggccggagcagggtgggcggcctgagccgagagcccggccggcccccgcgaggaatatggcgacctgcggcgaccggagcagcagcggcgtcagttgctgcaccgccgacttcttggagcagcgaaagcgactcgcgagaagacgccgccaagtggaacccgggccctgcggccctgggagggggcagcagcgacacagccatgaagccccgggcgcggcgctgggcgccaacgagagccacggcaacctccagacggcgccacagcaacctctaggcagtgcccacaccagcctacaggtggcgcccctcgcactgcacctgccgcggccgccccgggtgtga

SEQ ID NO: 706 - protein, 214 aa, Homo sapiens
MRCVAAETRELLKGTRPHLSALTHLPQSFSGSNLARGGPSSCSRARNHGAQPRATLGPAGAFRFLASFFPAPPAAGEAAGAQCLEVAPSPPLAAGTERRRRPEQGGRPEPRARPAPARNMATCGDRSSSGVSCCTADFLEQRKRLARRRRQVEPGPCGPGRGQQRHSHEAPGAALGANESHGNLQTAPQQPLGSAHTSLQVAPLALHLPRPPRV

SEQ ID NO: 707 - DNA, 2118 bp, Homo sapiens
  CDS (39)..(1247)
agcaggagggtgggaccaagggtgctgctggaccaaggatgggactgggccaagggtggggctgggaagcatcctgttttgcatgtttgatcaggagctgctgccaagttgtgactttcactttcccttttgggttccagggtatatctcagagcctggagaacgtgtctggttattatgcagatgcacggctggaggtgggatccacacagctcagaacagctggatcttgctcacactctttcaagagaagcttccttgaaaagaaacgctttactgaagaggccaccaaatacttccgggagagagtcagcccagtgcatctgcaaatcctgctgactaacaatgaagcctggaagagattcgtgactgcggctgaattgcccagggatgaggcagatgctctctacgaagctctgaagaagcttagaacatatgcagctattgaggacgaatatgtgcagcagaaagatgagcagtttagggaatggtttttgaaagagtttccccaagtcaagaggaagatccaggagtccatagaaaagcttcgtgcccttgcaaatggtattgaagaggtccacagaggctgcaccatctccaatgtggtgtccagctccactggcgctgcctctggcatcatgtcccttgctggtcttgttttggcaccatttacagcagggacgagtctggcccttactgcagctggggtagggctgggagcagcgtctgctgtgactgggatcaccaccagcatcgtggagcactcatacacatcatcagcagaagctgaagccagcaggctgactgcaaccagcattgaccgattgaaggtatttaaggaagttatgcgtgacatcacacccaacttactttcccttcttaataattattacgaagccacacaaaccattgggagtgaaatccgtgccatcaggcaagccagagccagggcccgactccctgtgaccacctggcgaatctcagctggaagtggtggtcaagcagagagaacgattgcaggcaccacccgggcagtgagcagaggagcccggatcctgagtgcgaccacttcaggcatcttccttgcactggatgtggtcaaccttgtatacgagtcaaagcacttgcatgagggggcaaagtctgcatctgctgaggagctgaggcggcaggctcaggagctggaggagaatctaatggagctcactcagatctatcagcgtctgaatccatgccatacccactgaccccagaccagtgcagccagcaggggaggtgagccatacacaggccacgacaaaatgcaggcattttattagggggataaagagggcaaggtaaagtttatggagctgagtgttagtgactttggcatttctgtagctgagcacagcaggggaggggttaatgcagatggcaagtgcaccaaggagaaggcaggaatgctggagcctggaataagggaggagaggggactggagagtgtggggaataggaagaagaaatttcctttagactaacgaatatattggggggaggaatagaggggaggtgtgcaggaaccagcaatgagaaggccaggaaaagaaagagctgaaaatgcagaaagccgaagagttagaacttttggatacagcagaagaaacagcggctccactaccgacctgcccccggttcgatgtccttccaagaatgaagtctttccctggtgatggtcccctgccctgtctttccagcatccactctgtcttgtcctcctggaagtgtatctcagtcagccagtggcttcttgatgatggcggtggaggtggtggttgtagtgtgatggatcccctttaggttatttaggggtatatgtcccctgcttgaaccctgaaggccaggtaatgagccatggccattgtccccagctgaggaccaggtgtctctaaaaacccaaacatcctggagagtatgcgagaacctaccaagaaaaacagtctcattactcatatacagcaggcaaagagacagaaaattaactgaaaagcagtttagagactgggggaggccggatctctagagccatcctgctgagtgccctgtgtgtaagtcctaataaactcacctactcaccaa

SEQ ID NO: 708 - protein, 402 aa, Homo sapiens
MGLGQGWGWEASCFACLIRSCCQVVTFTFPFGFQGISQSLENVSGYYADARLEVGSTQLRTAGSCSHSFKRSFLEKKRFTEEATKYFRERVSPVHLQILLTNNEAWKRFVTAAELPRDEADALYEALKKLRTYAAIEDEYVQQKDEQFREWFLKEFPQVKRKIQESIEKLRALANGIEEVHRGCTISNVVSSSTGAASGIMSLAGLVLAPFTAGTSLALTAAGVGLGAASAVTGITTSIVEHSYTSSAEAEASRLTATSIDRLKVFKEVMRDITPNLLSLLNNYYEATQTIGSEIRAIRQARARARLPVTTWRISAGSGGQAERTIAGTTRAVSRGARILSATTSGIFLALDVVNLVYESKHLHEGAKSASAEELRRQAQELEENLMELTQIYQRLNPCHTH

SEQ ID NO: 709 - DNA, 14882 bp, Homo sapiens
  CDS (565)..(14826)
aacggttctaacagctgggtgcgggtggagctgcgggcgatcgccagctcgagtgcagattccttgctgtgaccgaggttcagagtgagctctgtcggtgtgtcagtttgcctcttcaggcactcttcaatgaaacctcatcagcagatcgggctctcttcccttgccttgcctcctaacccccctaggccaggtgagggggacagggtactgggaggtaagaaggaactcttctgcaaggagggctctcacgtctgtcttaggcctgctccttaccagagtctttggggaagcagtagggagggcctgagggtctcaggaaaggctctctgctggtctggctctgctctgtagctccatctatttccctgtcccaggtcctttcttcctcctaaccccattgactctgaccatcccctgcccagagcctgaggtcccttctctggcccctctgctgggctggcccatgcaggtgaggccccgcatctggcatcctggaactggcagttggagcctgagctatgggcaaggtcacttcgacagcagttgaatgcccagctcctcatggtcccggaggagaggagggtaggtttgtcttctgatgagacatcatctgattcccttaagtcttggcactccatatgtgtcttggacagcaaagaacagcccttggcctgccagcagaaacagaggcagttcgtgaagccagtgactgagtcagagcagcccacagtgctggaactcctgctagctgagctccgaactctgttctcagctgtgttgcaggacagtagccctgcagcttggcgctatcttcatgcagtactgggtctactgcctccatatcgtgagttgctagttggccaccttgatttgctgcccttcctggagcagctgtactgctgggcaccctgggtccaaacccacctccatctggacctgctaggtgccattgtccaggcctttcctccagacagctctttgttagacagtgcttcccatgctgactgctgtccccagaagcggaggctccatcacaggcccccatgcccagcttgcccttttgtgcaggcccagtggagcaggcagcaagtaaaggaggagctggccacctggctgcgaccattgacactgcctgagctacagcgctgcctgggcattgttggtgctcaggtggccctagaagaggctgtgtggctggatggacttagtctccttcccttggcactggcagcggacatccctgtacggtatgaaagcagtgacactgacaatgcagaggtggagcctgttggaagaaaagagaccaggtctcagcttgactatgaagttcccagggaaaaggccttccaaaagagcagcaccggcttttcacctgagacttccttcctggatagccaggtgatgactgctctgaagatggagagatacctgaagaagatccacttcctctatctcaatgtggctcccagccggtactttaggccttacagcctgatggtggtgccacccgacaaggtgaatcccgagcactacatcttctctccctttgggatcttgcatgtacatcctgtggaaggtagcgagacgatgacactgggtacctggcaccatcactgtgttctctggcagcagctccagttcattccattctttaagtattgcctcttacgcaagtcctttacctgttggaagaagaatgtgagattacaggggctgcatcgactccagaaattcctagagaatcatctgctcttggctgtgccccactttggagctgggctactccatattagcaggcttctgcaggagctacactctgtgtcctggctaccccaggaactggatcggtgctatgagctgctggacctgcagacggctctagccgaggagaagcataaggctctacggctgctccatcgttgcctaaacctctgcacatccattcttcgactggttcacgaggacacataccacatgcaacagtgcctacaggagcgagtacaaaactgtgacaggatcaggacaggccaaggctccatataccttcagagggtacagcacaagcaactggagcagaagctgaagcaagcagaggcctggtggctgcagctgggaaagtttgcccgcctggttgactacatgatttgtcagagcctcatttctgtcttggaagagcagataacctcttttgtggccaacatccttcaagccccaaggcagaaaccctttctctcatcacagctggtctttgatgatcatggtcaactgtctcatgtgccctgtgttgaaaatatgatccagactctaactggaggcctacagtctgtcaagacctctgccttgcaggtagtgcagtctgcagacctgaagacctcctcggattccctgtattctgaagaagaagatgaagaggaggactcaaaagacgaatttctgatgcccaagttccagggccagcccagcgatgctgtgagcatcttctgtggcccgaatgtgggattggtgtggccctggaagtctcacccaattgctggtatcttggaggtccgtggatgtcggctgcggggccaatacttcccccacaattataagcagctggaggaagacctggacaacaaccctaagatccagcaggcactgaatatacaacaggtgctgctggagggcgtgctgtgcaaggtgcaggaattctgcagggaacatcattggataacaggcatttatgaattcctgcaatcctgggggcctcagaagctggaagacatgagaggtggtcccatcaagaactacgtgacgctggtgagccgcctgaatgtttggcaggcccgtgtctccagtatgcctatcgagttgctcacaaaaggcgggttgctgctacttagctgccatgatgtacaggcagagatggaatccaagctgaacagcataaggaaggacattcttgcacacgtgcaaaatgagtgctggaacctcagtcaacaactcatgacagagctcacagatttcatgcatatcttccgaaccatcaactcagatattcatgccattgcacagtgcacccagaagttgaatgaagccaatgaacagtacgtcgagctggaggagcgaatggaatacgtacgggcactccacgaactcatccgcaaccactttagcctctttagtgctgagaatgaagcactggacatctcggtgagaaggcaattcggggagtcacccatccctccctgccctcctcccccacaaccacatctactccactgccctctgcttgccccacagcttctggatatgtgggaggcatttcagtttgagaaaagccaggcttcagagttcctgctcagcaagcgacatgccattatgcccaagctgcagcagctgatggcagcagcattggcagagctggaaggcctgcttgcgaaggccctctccggtccctttatggaccccacacaagatcagaggagtactgagcaccagctcgtctccctagagcgtcagttccagaacacagtcagcgacctcagtgaactgcaccacgcctatgccatcttcactgaggatgagactcctgtgcccttgccaatctgtgggacacgtcctattgtgcagcagcagcgcatatggcacctgtaccgagtcatctccgaaaacatcagcgagtggaagtgcatggcttttgccaagttcagcccagctatggcccaggagaagacagagggctggctgacagaggcagcacggatgagcacaaccctggagctgcacagccccgtgctgcagcactgcatgcgcatcctgggggagtttcgcagctacctgcccctgctcactaagctgggcagcctccacccacagagcctcaactgccagtgtctcctgcgtgcccttgggctgggcagtctccaaactatagaactcctaacgctgggccagctgcttacttatccactgctggagtttgcagatcgaatcaaccaggtctggcagaatgaaaatgaacgaattcatgcccaagagactatacggcggttgcagcggtactgggaagcgcgccagctgcgcctgctcaacttcatcctgcatgtaccctacgagcccccagcctcagagcgctccaagaggcaggtgctccgcagcccccaatgggaggtagtggacaaagatagtggcaccttcatcctctcagattacagcaacctgcaggattccatccaggaaagtcttcaggtgttgtccaagatcttggccatcgaaaagtcaggagatttaaacaaaatagctttggagtgggtggccatcatgcatggcctgggtgccctgctggaggtgtggctgactttccagcagaagtggatttttctgaataaagttctgcatgagatgaagatccagtttcctaatgctgacctgaactctcgtttcaaggtcatggatgaccagtatcgaaccctgatgcgcatctctgtagctgaccccatggttctgtcacttgtagtgcccagtgccgagaggagcccttacttccaaggccagcagctgcaacaactgctgcaagcaggatcggtggagctggagggcatcatcatgagtctggagagcgtgctctatggggtgtgtgctcacttcccccgcctcttcttccttagtgacagtgagctggtagccctgctggctgctcgactggaatcatgcgaagcccagctatgggtacgacgctgctttcctcatgtgcatgctgtgagcttcaggtcttgcccaactggtgagaaaaacacagatgactgggagtcaagcccaaacacacagactcaggtggaggcacttgcagtgctaggggcaggtggggaggaggtgaagctgcagggtccccttcctctgcatccagatctccctaagtggctggcctctctggagaagtgtctgcgcttggcactggtgcacatgctgcagggctgtgtggctgctcgccttgctcgaggcccatctctaggtgaggccctcaagcaactgcccaagcaaaacaagttgtacctgcaactgtatgtccagcactggatcgacttagtccaggccttcccatggcagtgtgtgctggtggcagaggaggtggtatggcgggccgagatggaggaggctctgcttgagtggggtaccctggccatggtctccatgcatatgcgcaagcttgaggtactggtgaattttatgcgggcccagagggcttcccaaggtgggcagtccctgccttctgtccgccagaccagccttctcagtgccctgctggtcatggcagtgactcaccgggatatagcacagctgctggaacagcaccaggtcagtgatctcacagactttcactgggtccgccaactcaagtatcacttgggttcacctcacataatccccaaaagccccctacagagtcttaagactattgcatcttctgaaccctctctgtcaccagcggcatgctggatagatgtgctaggcaggtccttcctgtacaattacgagtatctgggacctagactagggcctctacccagcctactgcctgaacggccagccctggtactattattggccctagaggaggtggcctgtgggaccgtactgggtcctaatggtgtgggcaagagagctatagtgaacagcctggcacaggccctgggccgccagctggtgatgctaccctgctcacctcagatagaggctcaatgcctgagcaactatctgaatggtgccctgcagggtggtgcctggctgctgttggagaaagttcatcagctgccccctggcttgctctctgccctgggccagcgcctgggtgaactgcaccacttgtatgccccactgtaccaggaggcttcccgaaacacaagcaccatagaccccacccagccccagctccttggcagtagcttctttgaaaaacatcacgtgtctgtgcgccttggctatggctgtctcctggtactgcgtgccctgagctctgctgtgcctgccaacctgcacctgctgctgcggcctgtggcattggcattgcctgatctgcggcaagtggcagagctgactctgctgggtgcagggatgagggatgccttccagatggctacccgcctatccaaattcttctctctagagcgtgagctggtgtctgggcccctgccctgccgcctgccactgctcaagcagatactggaagacacaatacggacactaaatgtgaccaaggaggaaccgaagtgccagaagcctcgcagcctagctgccattgaggaggctgccctactgcgctcaccactgtttagcattctcaatgggctccacctgcacaacctccgagggctgttgtgtgcgcttttccctagcgccagccaagtgctggcagaacctatgacttacaagctgatgaagccattggtggtggaggaactgcaacaggtaggtctggatcccagccctgacattttggggtccttggaacagttgagccaggccctgagccgggcctcaggcattctgctcctgggccctgcgggcagcggcaagaccacttgttggcacagcttatttaagatccagaatcggctggcagccatggaggacacctcaacccaaggctgccagcctgtggaaattacccacctgtaccccagtggcctcagcccccaggagttcctgggatggctagagggctcctgctggcatcatggcatctttcccaaggtacttcgtgcagccggtcagtgtaacaacatgggccaaaagaggcagacagaggaatcaatcgggatccagcactggataatatgtgatggagcctccaatggtgcttggctggactccatcacttgcctcctgagtgagcttccccagcttagtctccccagtggacagcagatagcacgacccccaggcacctttctcttgatggaggtggctgacacaacaggcatatcccccacagtggtaggctgttgtgccctagtctggtgtggtggagagcagacttggcagtgtatacttagtgccctgatggcatcccttccttatgagtaccgcctgcagcaccggacagtcgctgagctcaaccacatggctgaggttctggtgcctgcaacattgcgattcctcacctgccaaggtgtcagctctctgctgcaggtacacgggcagcaggctgtttgtgcaggtgtggcagaagttaccagcatggcacgcatcttgcatagtctgcttgacctccaccttcgcctaaaggaggagaaggcccctggcccagaggacctcagctatagtgatcctgtggcccaaagcttcaggtcttcaaaaagcagctttctaaaccggtcccaggttgacagtgacgatgtgccagataagtgcagggaacacttgctggctgtcagcagttttctttttgccttgatctggggctttggagcccaccttccctccaggttctggcccatctttgataccttcataagggattctattagtcgcctctccaactaccctgagccaccaccctcagccttggtgtttgatctacatgtaagccctgaagatggaacactggtccccttcactggccaatacctgagcagccacatcaaaggaactttgggcacctttcacccttctatccagactgaacggctcttgtatgtggtggacctgcttctgtcagggggacagccagtgttgctggctggagaggcagcaacagggaagtcagcctttgtggaggtgctggtagagccacatcacccttacatatacagccccatccaccctgccttcagttcctcccacctccgtctcctgctgagcagaggaatccagggccaaacacaagccagcccacagcctgggcatcaccaggattctaaaccctccctcctcttcttgctggaggacctgcacctagccacttctgacccagagaagagctgccagccagtgttggagactctgcgccaggccatggatggcactgtgtatgcccacagcaccttggaactgcagacgctgcagcctacagtcaacttccttgccactgtcacagtgccaggatactgtgagcgcccactgtgtccacgcctctttcgactcttcacagtcctggccctggaaagcatgacccaggccaccctgctggaaagacatgtgcctatcattcaggcttggcttgagcgtttcccttctgtggaacgggagcgtgctctggcacgaggtctggttagggcctcagtagaggcctgggaggctgtgtgcaattgcttcatgccttcacccctccacccacactaccacttctccctacactctgtgagccacctactgagcagcctgcagctgctgcccaacagaacaggctcccgaggttttgtggactatcccaaccaccaggagcacttgcgccgggtgtcaggcctgcgaggcacttgtctgaccgttatgatggccacacgcaatgtggtgcgtctttggttgcatgaggcacagagaaccttttgcgaccggctggacagccccagggaacgctcctactgtgccaagctgctcctagtagtagctcaaagtgtcttctgctgtgggccagggccccagcacctgggcaaggaccatcaggagagtgaggaggaggaggaggaggagagggtgcccgaagtagaatctgaaggggagttggcccagtgggaggacttcagcaacagcaatagtgaaacagaggaggaagaggaaccttatggccttcaggtcgccagagtctcaaactccagagatccaagtctaacaccatccataggaccagtaagcagggggatgaaggaaagcataagtcacaagataaggcaagagaaaggcacaagggcatccaactataggctccaggtaaggagatcattcaagacttggtggcagaagaaaccccagatggacctgatctcacccttgttgttaccagtgttactactacatccccaggaaaagccctcagacctggtcttcagtcaggagctgatactggggcctaactctgagacccccaacttgtacctggaacgacagtgggagaagctagaggagcagttggccacctcagctgctcaactgaagttgagcccccacctggcccggtgtcattccatggcccagcacgtggcccgcctggtccgggtgctggccaggccccggcagcatggcctgctgctctcgggggctctgggtactgggcgccacactgccatcactctggcttctagcatttgtcaggcccatttctttcatctaccatctgggtcagaggaggccattctccaatgtctacgagatgccagctggcatgctggcatgttaagccagccagtggctctgttggtacccagtggtgtggatctcactacacttcatcgcctcctggccctggcaacctcaggcagtttccctggccagtacacagaagcagatttggaccgcattggagaacacctccccagggagaaccttggtgtcaaacagaacatcaagaaggaaatggtgttgcagaggttccaccagcaagtgtgcagccaccttcacctgttcttcctgattggagataaacaggcccacaagcagctgccctccacccttttcctgaggctccttcaactggccactgccagcattgaccgctatgaaccctgggaccaagctgccctggccaaggtggcccagcatcacctggagggtgctcagagtgtgccccttgatgacggctcctggaagtacccagacctccaggcctcaattcccagtgtggccaaagccatggctcttatccacctttcggccacccactaccatgagcacctgtgccctgcattgccactcgtcacccccaagaccttcctagacttcctggacactttcctgatgctgcagcaacagacaatcctgaagattaagaacaaggcccagcgggtccagaatgccttggagaatctgagaatgctgattaaggagcacggtacccatgccaatctgatctttgacttggaacagcagctgaaagactccggcaagagtctcagcatgtttcagcagcagctagagcaaagcaagctcctatacaagcagcagctggaagagtgtcggcatcaagagaacctcattgagaacctggccaggcaacgggatgccctgcaagctcagcgagaggctttcctggagcagatgagcaaggcatttctggagcctctgagccagctgcaggtggctgactttgaggagatacggagctatcgagcaccaccagaatctgtggtccgggtaactgatgcaatgtgtgacttgttccaccatgaaacaggctgggccagtgccaaacagctgttatgcactgaggatttttatcaggagctggtgttcttccccaaggagaagataacagactcagagctgataaagttacatctaattctgaaggctccaggtatggacgatgcagccctgcgggcagtgagccgacctgcagccagcctggcagcctggctctgggctgttctgcactatgggctggcgcattgccggggactgcccacggacctgctgctgcagcaagtggaggcaacactcactcgggagcaggcccgcctgggctactaccagtttcaggcccaggagaccctggagcataatttggccctggctaagatggtggaggatgcccaagcttcccacaactgcgtggcaaagaccctcagtcaagcacagtgtgggcagtatcacaaatggcccatgaaggctgcactgctcacgcctatgcgtgcctggactacacagctccagaagctgaagggacgctgcatgactgtgtttggagataccctcctatgttcagctgccatcatctacctgggtcccttcccaccattgcggcgccaagagctactggacgagtggttagctctgtgtaggggctttcaggaggctctgggcccagatgatgtggcacaggcactgaagcggaagcaaaaatctgtcagcataccaccaaagaaccccctgctggctacacactctcccttcagtattctgtccttgctgagctctgaatcggagcagtaccagtgggatggaaacctgaagccacaggcaaagtcggcccacctggcaggcttgcttctgcgaagccccacacactacagtagttgccgttggcctctgctgcttgaccccagcaacgaggccctcatctggttggacccgctgcctctggaagagaatcgatcttttgcgccagccctcactgagggtagagggaaaggcctcatgagaaatcaaaagagagagagtaaaacggacatgaaagaggaagatgatgagagtgaagagagtaatgaggctgaggaccagacaaaagagcagaaggcagaggaaagaaaaaatgagcaggagaaagagcaagaggaaaatgaagagaaagaggaggagaagacagagagccaggggtcaaagccagcctatgagactcagcttccatcccttccctaccttagtgttctttcaggtgctgacccagagctgggttctcagctccaggaggcagctgcttgtggcctgcctgtgttactgaccaatgtggagctgggtctagggtgcgaagaactgcaatggctgctgcaacgggagcagctgagtccaccccaggtgcagcctggcttctgtctgtatctcagcaccaccctctccctctgtgccatggaaaaagtgctaggttgtgaactgctaaaggggctgaatgtgttggatctgggcctgaacatggaaatactggaagaacagatgctgcatgaaatcttgtgcagagagtatcctgaactcgagacccgctggcaggacctaaagatcagagccctagatacctgcaaggctgtggaggctgctgaggagcggctgctgacgatgctgctgttccagaatccgaagcgtcagaagccagccaagtttctgcggaacatagtgagggcccaaggaaagctatgccagctgcgtgctcattgtgaagagttagaagggcagaaactacaggagatggtattgtgggcaccctatcgacctgtggtttggcatggaatggccatggtaaaggccctaagccaactgcagaacctgctgccacttttctgtatgagcccagagaactggctggcagtcactaagcaggctctggacagcatgaagccacgtgagattaatcacggggaggacctggccagccatctactgcaattgagagcacacctgacccgccagctgctgggcagcaccgtgactgcactgggccttacccaagtacccttggtgggtgcattgggcgctttggctctgctgcaagcaacagggaaagcatcagagctggaaagactggcactctggcctggactagcagcctctcccagcacagtccacagcaagccagtctcagatgtggctcgaccggcctggcttgggccaaaagcctggcatgaatgtgagatgttagagctgctgcccccatttgttggcctgtgtgcctccctggcaggccactccagtgcttggcaggcttacctgtcactgtcatccacagtgctgggtcctgcacctgggccagggcctgagccactcagcctcctccagaagctgatcctgtggcgcgttctgcgacctgagtgcctggcaggtgccctggcagacttcaccactagcctcctgggtcggcccctggatgaaaacacgtatgctcccaccatgccctttaaacatagtcaggctactcagcccatgctgatcttgttgccaccgcctggccacccctcagccactctgcatcctctgactgtcatccagaaactggctgccaagtatcagcaggggcagaagcaactgcaggtgatagccctgggctctgaagcctgggacccagtctcagttgtggtcagcactctatcccaggctatgtatgaggggcactggctggtgctggacaactgtcatctgatgccccattggccgaaagagctgctacagctcttgctggaactgttaggcagagccaaggtggttgcagacctggaatcagaacagcttttagaccaacctgaaagcaggaatgtaagcactgttcacagagattttcgtctttggcttattgtgcctgcagagtctagtgcttctttgccagctgtgctgactcagcactccatgcctgttttctggaaccagtccctggagctgggccatgttttgattgacagtgtggagctagcccagcaagtactctacatgcaaccccccacccaggcactacctctgctcctcctccatggcctcctgctacaccggcagctctatggaacaaggctgcaggcacacagggggcgctggagtcaagtgactctaacccaggttcttcagacccaagaccagctgtgggcaagtcttagcaatccccgtgctgccatgcaagagctggctgcttcagttttctacgggggtcctctgggggacactgaggacagggaggccctgattagcctcacacaagcctgcctgagccccagtagtgggagctgggtccagccacacacacctcagtctttgctggccacgctcatgcccctcccagagctaagggagctggatgcaatggcagagtgcaaggcccagatgcacctactgccctcaccacctgaaccccggctctgcggactgagtgagggcccccaagcctggctgttgcgacgccagagtcgcgctctcttgagtgcgctgcagcggagttcacccgtgtgggttcctgagtctcgaagaggcgcccagcttgcggaaaggcgactgcggcaacgcctagtgcaagtcaaccggaggctggagtcactgcaggatctgctgacccacgtgattcgccaagacgagtccgacgccccgtggtcagtgctggggccaaatgcacggcggcctctggagggcgtcttagagaccgaggctctagaactgagccagttggtgggcacgctacaacgcgaccttgattgcctgttgcagcagctgaagggcgcacccccgtgcccctcccgccgctgtgctgcggtggcccacgctctctggactggccgcctacccttgccttggcgacctcatgcgccggccggtccgcagccgccctggcactggctgcgacagttgtcgcgccgtgggcaactgttggttcgttacttgggcgtgggcgcggacgcgagcagtgatgtaccagagcgcgtcttccacctgtcagcctttcgccacccgcgccgcctgctgctggcattgcgtggggaagctgccctggaccagaatgtgcccagctcgaatttccctggtagccgaggctcggtctccagtcagctccagtataaacgtctggagatgaacagcaaccctctgcacttcagggtggagaatggtccaaatcccacggttccagagagagggctgctgctgatcgggctacaggtcctacatgcggagtgggacccaatagctggagccttgcaggacagtccttccagccaacccagccctctgcctcccgtcagcatcagcacacaggccccgggcaccagtgacctgccagccccagccgacctgactgtgtactcgtgtcctgtgtacatgggagggccccttggcaccgctaagctgcagagcaggaacatcgtgatgcatctgcctttacccaccaagctcacccccaacacctgtgtccaaaggagggtccatgtgtgcagcccacccctgtcttgagcccgtctaccaaaataaagttgtagtgattccatgaaaaaaaaaaaaaaaaaaaa

SEQ ID NO: 710 - protein, 4753 aa, Homo sapiens
MVPEERRVGLSSDETSSDSLKSWHSICVLDSKEQPLACQQKQRQFVKPVTESEQPTVLELLLAELRTLFSAVLQDSSPAAWRYLHAVLGLLPPYRELLVGHLDLLPFLEQLYCWAPWVQTHLHLDLLGAIVQAFPPDSSLLDSASHADCCPQKRRLHHRPPCPACPFVQAQWSRQQVKEELATWLRPLTLPELQRCLGIVGAQVALEEAVWLDGLSLLPLALAADIPVRYESSDTDNAEVEPVGRKETRSQLDYEVPREKAFQKSSTGFSPETSFLDSQVMTALKMERYLKKIHFLYLNVAPSRYFRPYSLMVVPPDKVNPEHYIFSPFGILHVHPVEGSETMTLGTWHHHCVLWQQLQFIPFFKYCLLRKSFTCWKKNVRLQGLHRLQKFLENHLLLAVPHFGAGLLHISRLLQELHSVSWLPQELDRCYELLDLQTALAEEKHKALRLLHRCLNLCTSILRLVHEDTYHMQQCLQERVQNCDRIRTGQGSIYLQRVQHKQLEQKLKQAEAWWLQLGKFARLVDYMICQSLISVLEEQITSFVANILQAPRQKPFLSSQLVFDDHGQLSHVPCVENMIQTLTGGLQSVKTSALQVVQSADLKTSSDSLYSEEEDEEEDSKDEFLMPKFQGQPSDAVSIFCGPNVGLVWPWKSHPIAGILEVRGCRLRGQYFPHNYKQLEEDLDNNPKIQQALNIQQVLLEGVLCKVQEFCREHHWITGIYEFLQSWGPQKLEDMRGGPIKNYVTLVSRLNVWQARVSSMPIELLTKGGLLLLSCHDVQAEMESKLNSIRKDILAHVQNECWNLSQQLMTELTDFMHIFRTINSDIHAIAQCTQKLNEANEQYVELEERMEYVRALHELIRNHFSLFSAENEALDISVRRQFGESPIPPCPPPPQPHLLHCPLLAPQLLDMWEAFQFEKSQASEFLLSKRHAIMPKLQQLMAAALAELEGLLAKALSGPFMDPTQDQRSTEHQLVSLERQFQNTVSDLSELHHAYAIFTEDETPVPLPICGTRPIVQQQRIWHLYRVISENISEWKCMAFAKFSPAMAQEKTEGWLTEAARMSTTLELHSPVLQHCMRILGEFRSYLPLLTKLGSLHPQSLNCQCLLRALGLGSLQTIELLTLGQLLTYPLLEFADRINQVWQNENERIHAQETIRRLQRYWEARQLRLLNFILHVPYEPPASERSKRQVLRSPQWEVVDKDSGTFILSDYSNLQDSIQESLQVLSKILAIEKSGDLNKIALEWVAIMHGLGALLEVWLTFQQKWIFLNKVLHEMKIQFPNADLNSRFKVMDDQYRTLMRISVADPMVLSLVVPSAERSPYFQGQQLQQLLQAGSVELEGIIMSLESVLYGVCAHFPRLFFLSDSELVALLAARLESCEAQLWVRRCFPHVHAVSFRSCPTGEKNTDDWESSPNTQTQVEALAVLGAGGEEVKLQGPLPLHPDLPKWLASLEKCLRLALVHMLQGCVAARLARGPSLGEALKQLPKQNKLYLQLYVQHWIDLVQAFPWQCVLVAEEVVWRAEMEEALLEWGTLAMVSMHMRKLEVLVNFMRAQRASQGGQSLPSVRQTSLLSALLVMAVTHRDIAQLLEQHQVSDLTDFHWVRQLKYHLGSPHIIPKSPLQSLKTIASSEPSLSPAACWIDVLGRSFLYNYEYLGPRLGPLPSLLPERPALVLLLALEEVACGTVLGPNGVGKRAIVNSLAQALGRQLVMLPCSPQIEAQCLSNYLNGALQGGAWLLLEKVHQLPPGLLSALGQRLGELHHLYAPLYQEASRNTSTIDPTQPQLLGSSFFEKHHVSVRLGYGCLLVLRALSSAVPANLHLLLRPVALALPDLRQVAELTLLGAGMRDAFQMATRLSKFFSLERELVSGPLPCRLPLLKQILEDTIRTLNVTKEEPKCQKPRSLAAIEEAALLRSPLFSILNGLHLHNLRGLLCALFPSASQVLAEPMTYKLMKPLVVEELQQVGLDPSPDILGSLEQLSQALSRASGILLLGPAGSGKTTCWHSLFKIQNRLAAMEDTSTQGCQPVEITHLYPSGLSPQEFLGWLEGSCWHHGIFPKVLRAAGQCNNMGQKRQTEESIGIQHWIICDGASNGAWLDSITCLLSELPQLSLPSGQQIARPPGTFLLMEVADTTGISPTVVGCCALVWCGGEQTWQCILSALMASLPYEYRLQHRTVAELNHMAEVLVPATLRFLTCQGVSSLLQVHGQQAVCAGVAEVTSMARILHSLLDLHLRLKEEKAPGPEDLSYSDPVAQSFRSSKSSFLNRSQVDSDDVPDKCREHLLAVSSFLFALIWGFGAHLPSRFWPIFDTFIRDSISRLSNYPEPPPSALVFDLHVSPEDGTLVPFTGQYLSSHIKGTLGTFHPSIQTERLLYVVDLLLSGGQPVLLAGEAATGKSAFVEVLVEPHHPYIYSPIHPAFSSSHLRLLLSRGIQGQTQASPQPGHHQDSKPSLLFLLEDLHLATSDPEKSCQPVLETLRQAMDGTVYAHSTLELQTLQPTVNFLATVTVPGYCERPLCPRLFRLFTVLALESMTQATLLERHVPIIQAWLERFPSVERERALARGLVRASVEAWEAVCNCFMPSPLHPHYHFSLHSVSHLLSSLQLLPNRTGSRGFVDYPNHQEHLRRVSGLRGTCLTVMMATRNVVRLWLHEAQRTFCDRLDSPRERSYCAKLLLVVAQSVFCCGPGPQHLGKDHQESEEEEEEERVPEVESEGELAQWEDFSNSNSETEEEEEPYGLQVARVSNSRDPSLTPSIGPVSRGMKESISHKIRQEKGTRASNYRLQVRRSFKTWWQKKPQMDLISPLLLPVLLLHPQEKPSDLVFSQELILGPNSETPNLYLERQWEKLEEQLATSAAQLKLSPHLARCHSMAQHVARLVRVLARPRQHGLLLSGALGTGRHTAITLASSICQAHFFHLPSGSEEAILQCLRDASWHAGMLSQPVALLVPSGVDLTTLHRLLALATSGSFPGQYTEADLDRIGEHLPRENLGVKQNIKKEMVLQRFHQQVCSHLHLFFLIGDKQAHKQLPSTLFLRLLQLATASIDRYEPWDQAALAKVAQHHLEGAQSVPLDDGSWKYPDLQASIPSVAKAMALIHLSATHYHEHLCPALPLVTPKTFLDFLDTFLMLQQQTILKIKNKAQRVQNALENLRMLIKEHGTHANLIFDLEQQLKDSGKSLSMFQQQLEQSKLLYKQQLEECRHQENLIENLARQRDALQAQREAFLEQMSKAFLEPLSQLQVADFEEIRSYRAPPESVVRVTDAMCDLFHHETGWASAKQLLCTEDFYQELVFFPKEKITDSELIKLHLILKAPGMDDAALRAVSRPAASLAAWLWAVLHYGLAHCRGLPTDLLLQQVEATLTREQARLGYYQFQAQETLEHNLALAKMVEDAQASHNCVAKTLSQAQCGQYHKWPMKAALLTPMRAWTTQLQKLKGRCMTVFGDTLLCSAAIIYLGPFPPLRRQELLDEWLALCRGFQEALGPDDVAQALKRKQKSVSIPPKNPLLATHSPFSILSLLSSESEQYQWDGNLKPQAKSAHLAGLLLRSPTHYSSCRWPLLLDPSNEALIWLDPLPLEENRSFAPALTEGRGKGLMRNQKRESKTDMKEEDDESEESNEAEDQTKEQKAEERKNEQEKEQEENEEKEEEKTESQGSKPAYETQLPSLPYLSVLSGADPELGSQLQEAAACGLPVLLTNVELGLGCEELQWLLQREQLSPPQVQPGFCLYLSTTLSLCAMEKVLGCELLKGLNVLDLGLNMEILEEQMLHEILCREYPELETRWQDLKIRALDTCKAVEAAEERLLTMLLFQNPKRQKPAKFLRNIVRAQGKLCQLRAHCEELEGQKLQEMVLWAPYRPVVWHGMAMVKALSQLQNLLPLFCMSPENWLAVTKQALDSMKPREINHGEDLASHLLQLRAHLTRQLLGSTVTALGLTQVPLVGALGALALLQATGKASELERLALWPGLAASPSTVHSKPVSDVARPAWLGPKAWHECEMLELLPPFVGLCASLAGHSSAWQAYLSLSSTVLGPAPGPGPEPLSLLQKLILWRVLRPECLAGALADFTTSLLGRPLDENTYAPTMPFKHSQATQPMLILLPPPGHPSATLHPLTVIQKLAAKYQQGQKQLQVIALGSEAWDPVSVVVSTLSQAMYEGHWLVLDNCHLMPHWPKELLQLLLELLGRAKVVADLESEQLLDQPESRNVSTVHRDFRLWLIVPAESSASLPAVLTQHSMPVFWNQSLELGHVLIDSVELAQQVLYMQPPTQALPLLLLHGLLLHRQLYGTRLQAHRGRWSQVTLTQVLQTQDQLWASLSNPRAAMQELAASVFYGGPLGDTEDREALISLTQACLSPSSGSWVQPHTPQSLLATLMPLPELRELDAMAECKAQMHLLPSPPEPRLCGLSEGPQAWLLRRQSRALLSALQRSSPVWVPESRRGAQLAERRLRQRLVQVNRRLESLQDLLTHVIRQDESDAPWSVLGPNARRPLEGVLETEALELSQLVGTLQRDLDCLLQQLKGAPPCPSRRCAAVAHALWTGRLPLPWRPHAPAGPQPPWHWLRQLSRRGQLLVRYLGVGADASSDVPERVFHLSAFRHPRRLLLALRGEAALDQNVPSSNFPGSRGSVSSQLQYKRLEMNSNPLHFRVENGPNPTVPERGLLLIGLQVLHAEWDPIAGALQDSPSSQPSPLPPVSISTQAPGTSDLPAPADLTVYSCPVYMGGPLGTAKLQSRNIVMHLPLPTKLTPNTCVQRRVHVCSPPLS

SEQ ID NO: 711 - DNA, 2840 bp, Homo sapiens
  CDS (268)..(1344)
ccgcactgacatggccgtcgcccggttccgcgcgtccgccgcgcgccggccgttaataggcttgctccctgagcgccccgcaccgacatggcggccgtcttcgctgtggtgactttaactctcggttttcggttatagccggccggcgctcacttgtcttcaggaagctcggagcctttggtggagccggggagaggaagggtgggtgcaagagtgaaaggcgagaggggactgcaagcatccgggtcggctcctggccggagcaagatggctgagggcgagcggcagccgccgccagattcttcagaggaggcccctccagccactcagaacttcatcattccaaaaaaggagatccacacagttccagacatgggcaaatggaagcgttctcaggcatacgctgactacatcggattcatccttaccctcaacgaaggtgtgaaggggaagaagctgaccttcgagtacagagtctccgagatgtggaatgaggttcatgaggaaaaggagcaggctgcaaagcagagtgtgtcctgcgatgaatgcataccattaccccgcgccgggcactgtgcaccttcggaggccattgagaaactagtcgctcttctcaacacgctggacaggtggattgatgagactcctccagtggaccagccctctcggtttgggaataaggcatacaggacctggtatgccaaacttgatgaggaagcagaaaacttggtggccacagtggtccctacccatctggcagctgctgtgcctgaggtggctgtttacctaaaggagtcagtggggaactccacgcgcattgactacggcacagggcatgaggcagccttcgctgctttcctctgctgtctctgcaagattggggtgctccgggtggatgaccaaatagctattgtcttcaaggtgttcaatcggtaccttgaggttatgcggaaactccagaaaacatacaggatggagccagccggcagccagggagtgtggggtctggatgacttccagtttctgcccttcatctggggcagttcgcagctgatagaccacccatacctggagcccagacactttgtggatgagaaggccgtgaatgagaaccacaaggactacatgttcctggagtgtatcctgtttattaccgagatgaagactggcccatttgcagagcactccaaccagctgtggaacatcagcgccgtcccttcctggtccaaagtgaaccagggtctcatccgcatgtataaggccgagtgcctggagaagttccctgtgatccagcacttcaagttcgggagcctgctgcccatccatcctgtcacgtcgggctaggaggggccaagccgaagagccacccaggccacagttcctgtgcctgccttccccaccccagcagtggcccctccccatcccctccctctgttcgtcccgtttgatgagaggctgtttactggggtggggtggcgagatgggcttgagggggctcagagcataaggcttcagggcccaagttgggagaagtgaccaaagtgtagccagttttctgagttcccgtgtgctagactggccagaagagagggtctggggcctggtcactcggccactctctcctgtttctggcctcttctcccttcactcccgtccagtctggttttgagagcaggggctgttctgcagcaccgcagggaagggaggagagatacctgctgcttccattgcttttcccttcctggagtcgatgcctttctaagggttggagctgctccttgcaggggcgggtcagtttcccaggccatgccggggtggccatctatggtagggctggaagctgaggctggccgccagctgtgggctggggtggggtgggtggggtcgggtggtggagaggccttagctgtcctggctggtgcccctcccaggctccttttcaccctgccccctgggcctgaggccccctgtgtccaagcctccccctggctcttcagttctctagcccttggctctgctgggtttcctgactgtagccacatctctcccgctccctaagggtaacctagccaatggaagctgccctttgggtaggtgctgggctcctgggagggcccagatgatggggtgaggcatgtctttccagaactttccctggcagggaggggatggcagaaactcagggaggggcttggggcccattgtatctggagagcctggattcctcttggcagtcttaggcccggccacttctgctacctttgcgctgctgtgagcctcaccctgggcccctgggccctgcttctctgctcccctgggtgatgggtgggcccagaaggtggcagtcccacaccttgtcctcccacctccctgaactgtccattgcttttatagggtgaggtaagagacagcctcccaagcccaggctttggcactcagaatgggcccagtgggggctgggcaggcccattgagggccaccgccgaggtttctcctagggctgttcctgggcctggctcttacaggctcgtcccccaggcctgcccttctccactgccccctcctgtgtctgggtccacacacccttcaggaagggggagcactgagaagcacagcacaggggctcagcctgggatccggtgatggtctgggcagaggctgggtcaggagtcccaaaggtcagtgacagtttctcagaagaggcccagcgtccacctctctcccagggccagacagcccttcctggctcccccatccccctatgggctcccagccccttgcaccctcattgctgttcagattaaagcctctgttttgcacctgtaaaaaaaaaaaaaaaa

SEQ ID NO: 712 - protein, 358 aa, Homo sapiens
MAEGERQPPPDSSEEAPPATQNFIIPKKEIHTVPDMGKWKRSQAYADYIGFILTLNEGVKGKKLTFEYRVSEMWNEVHEEKEQAAKQSVSCDECIPLPRAGHCAPSEAIEKLVALLNTLDRWIDETPPVDQPSRFGNKAYRTWYAKLDEEAENLVATVVPTHLAAAVPEVAVYLKESVGNSTRIDYGTGHEAAFAAFLCCLCKIGVLRVDDQIAIVFKVFNRYLEVMRKLQKTYRMEPAGSQGVWGLDDFQFLPFIWGSSQLIDHPYLEPRHFVDEKAVNENHKDYMFLECILFITEMKTGPFAEHSNQLWNISAVPSWSKVNQGLIRMYKAECLEKFPVIQHFKFGSLLPIHPVTSG

SEQ ID NO: 713 - DNA, 1349 bp, Homo sapiens
  CDS (77)..(1270)
cctgtcctgtaggacctccctctcctgaggccaccactgggcccccttctgagtgtcccctgagcactctctcagcatgaactgcatatccgacttcttcacctatgagaccaccaagtcggtggttgtgaagagctggaccatcgggatcatcaaccgagtagttcagcttctgatcatctcctactttgtagggtgggttttcttgcacgagaaggcttaccaggtacgggacacagccattgagtcctcggtggtaaccaaggtgaagggctccggactctacgccaacagagtcatggatgtgtctgattacgtgacgccacctcagggcacctcggtctttgtcatcatcaccaagatgattgttactgaaaatcagatgcaaggattctgcccagagagtgaggagaaataccgctgtgtatcagacagccagtgcgggcctgagcgcttgccaggtggggggatcctcactggccgctgcgtgaactacagctctgtgctccggacctgtgagatccagggctggtgccccacggaggtggacacagtggaaacgcccatcatgatggaagctgagaacttcactattttcatcaagaacagcatccgtttccccctcttcaactttgagaagggaaacctccttcccaacctgacagccagggacatgaagacctgccgcttccacccggacaaggaccctttctgccccatcttgcgggtaggggacgtggtcaagtttgcggggcaggattttgccaaactggcgcgcacggggggagttctgggcattaagatcggctgggtgtgcgacttggacaaggcctgggaccagtgcatccccaaatactccttcacccggctcgacagcgtttctgagaaaagcagcgtgtccccaggctacaacttcaggtttgccaagtactacaaaatggaaaatggcagtgagtaccgcaccctcctgaaggcttttggcatccgcttcgacgtgctggtatacgggaatgctggcaagttcaacatcatccccaccatcatcagctctgtggcggcctttacttctgtgggagtgggaactgttctctgtgacatcatcctgctcaacttcctcaagggggccgaccagtacaaagccaagaagtttgaggaggtgaatgagactacgctgaaaatcgcggctttgaccaacccagtgtaccccagcgaccagaccacagcggagaagcagtccaccgattcgggggccttctccataggccactagggcctctttccagggccccacactcacaaaggctccaggcctccccacagaggaccctgcctgagcaaggggcatggga

SEQ ID NO: 714 - protein, 397 aa, Homo sapiens
MNCISDFFTYETTKSVVVKSWTIGIINRVVQLLIISYFVGWVFLHEKAYQVRDTAIESSVVTKVKGSGLYANRVMDVSDYVTPPQGTSVFVIITKMIVTENQMQGFCPESEEKYRCVSDSQCGPERLPGGGILTGRCVNYSSVLRTCEIQGWCPTEVDTVETPIMMEAENFTIFIKNSIRFPLFNFEKGNLLPNLTARDMKTCRFHPDKDPFCPILRVGDVVKFAGQDFAKLARTGGVLGIKIGWVCDLDKAWDQCIPKYSFTRLDSVSEKSSVSPGYNFRFAKYYKMENGSEYRTLLKAFGIRFDVLVYGNAGKFNIIPTIISSVAAFTSVGVGTVLCDIILLNFLKGADQYKAKKFEEVNETTLKIAALTNPVYPSDQTTAEKQSTDSGAFSIGH

SEQ ID NO: 715 - DNA, 2618 bp, Homo sapiens
  CDS (385)..(1623)
gtgaacgggttgtgggacctgtcgctgtgtgggggctgtcgagcactccccagaacgtaacaaatcctcaggggaactgatgggcggtcgcgcgggcactgggtcctccacaccctggagagccgttttccgttgccactcggctctggccggggtcacattctgcagcatgtctgttcattcccctgggcggggccctgcaccgactccagcccagcccctgctccctctgcggggaacgtggccccaggcagtgctgggccattggctgtcagtgctggtcctggcggctgcattcccagtccccttggtctctgtgacagtgggcggggccggccctcccaggatctgacggcgcaggtcctccccttctgtgtcctgcagatggacacccgctccgggagccagtgttccgtcaccccagaagccatactcaataatgaaaagctggtcttgccgccccgcatctccagagtgaacggctggtcgttacccctgcactacttccaggtggtgacctgggctgtcttcgtgggcctttcctcggccaccttcgggatcttcattcccttcctgcctcacgcgtggaaatacattgcctacgtggtgaccggggggatcttctcgttccacctcgtcgtccacctgatcgcgtcctgcatcgacccggccgactccaatgtcagactcatgaagaactattctcagcccatgcccctcttcgacagatcaaaacatgcacacgtgatccagaatcagttctgccacctgtgcaaggtcaccgtgaacaagaaaaccaaacactgcatttcctgcaataagtgtgtgtccggcttcgaccaccactgcaaatggatcaacaactgcgtgggaagccggaattattggttcttcttcagcactgtggcctcggccacagctggcatgctctgcctgatcgccatcctgctgtatgtcctcgtccagtacctcgtgaaccccggggtgctccgcacggaccccaggtatgaagatgtcaagaatatgaacacgtggctgctgttcctccccctgttcccggtgcaggtgcagaccctgatagtcgtgatcatcgggatgctcgtgctcctgctggactttcttggcttggtgcacctgggccagctgctcatcttccacatctacctgaaggccaagaagatgaccacctttgagtatctcattaataaccgcaaagaagagagttcaaaacatcaagcagtgaggaaagatccatacgtgcaaatggacaaaggagttctccagcaaggagctggcgccctgggctcatctgcacagggagtcaaagccaagagctccctgctgattcacaagcacttatgtcacttctgcacttcagtaaaccaggatggggattcgacggcacgggaaggggatgaagacccgtgtccatctgcacttggagccaaggccaggaactcccggctgatttgcaggcgcctgtgtcagttctccactcgtgtacacccagacgggggctcgatggcacaggaagcagatgatgccccgagtatatctacacttgggctgcaacaagaaacaacagagcccatgaaaactgacagtgctgaaagtgaagactgagattcaggagctcaggtgcccctgtgatccaggtcttctaccctgaaaccccaccctccatcaaggtcctgcctgtagagtctaccttgcaaagcctcctgctcctacccatgctacaggccaggaaccagagcccatcatctcagaggcccctggatgtccttcgaaggaaccaggaccctcagagcccagcatccatctctgtcatcatcttcatcacacccaaagaagagccagccttgcaggagggtttacatctccaggaagatgggctgccagcaactgcagaggatgcagccacctgcttaactgtgctgtccagccagccagccagctgcagggcctcttgctgcttaagagctgatgggccgggcatgttggctcacacctgtgagcacagtactgggaaatgggagcacagtactaggaaatgggagcacagtactgggaaatgggagcacagtactgggaaatgggggctcacagcactgcaaaatgggagcacagtattgggaaatgggagcacagtactgggaagtgggagcacagtactgagaagtgggagcacagtactgagaaatgggagtacactactgagaaatgggagcacagtactgggaaatgggcatacagtactgagaaatgggagcacacagtactgggaaatgggagcacagtactgggaaatgggagcccacagtactgggaaaggggagttcacagtactcggaaatgggagcatagtactgggaaatgggagcacagtactgggaaatgggagcatagtactgggaaaccccagacctggattctgagtttttcagcctagcccagacttcttatcttagtagacaaaaagagtcaataccagagaaccagaggcatcctctgtattttaatgaactctgcattttaatctgtttagtagtcattttttaaaagataatcagttttccaaatatatctataagttactacgtgcaaaaaaaaaaaaa

SEQ ID NO: 716 - protein, 412 aa, Homo sapiens
MDTRSGSQCSVTPEAILNNEKLVLPPRISRVNGWSLPLHYFQVVTWAVFVGLSSATFGIFIPFLPHAWKYIAYVVTGGIFSFHLVVHLIASCIDPADSNVRLMKNYSQPMPLFDRSKHAHVIQNQFCHLCKVTVNKKTKHCISCNKCVSGFDHHCKWINNCVGSRNYWFFFSTVASATAGMLCLIAILLYVLVQYLVNPGVLRTDPRYEDVKNMNTWLLFLPLFPVQVQTLIVVIIGMLVLLLDFLGLVHLGQLLIFHIYLKAKKMTTFEYLINNRKEESSKHQAVRKDPYVQMDKGVLQQGAGALGSSAQGVKAKSSLLIHKHLCHFCTSVNQDGDSTAREGDEDPCPSALGAKARNSRLICRRLCQFSTRVHPDGGSMAQEADDAPSISTLGLQQETTEPMKTDSAESED

SEQ ID NO: 717 - DNA, 1885 bp, Homo sapiens
  CDS (49)..(1527)
ccgccgcagccgccgcagcagcagcagccgccgccccaggccccccccatggagcccgaggccccggattcccgcaagaggcccctcgaaacgccccccgaggtggtctgcaccaagcgcagcaacacgggagaggaaggcgaatacttcctgaaggtgctgatccccagctacgcggcgggctccatcattggcaagggcgggcagaccatcgtgcagctgcagaaggagaccggagccaccatcaagctctccaagtccaaagacttctaccccggaaccacagagcgggtatgcctagtacagggcacggcagaggccttgaatgctgtgcacagctttattgccgagaaggtccgagaaatcccacaagcgatgaccaagcctgaggtggtcaacatccttcaaccccaaaccacgatgaaccccgacagagccaagcaggccaagctgatcgtccccaacagcacggcgggcctgatcatcggcaagggaggcgccacggtgaaagccgtgatggaacagtcaggagcatgggtgcagctgtcccagaagccggagggcatcaacctgcaggagcgcgtggtgacggtcagcggcgagcccgagcaggtgcacaaggccgtgagcgccatcgtgcagaaggtacaagaagacccccagagcagcagctgcctcaacatcagctacgccaacgtggcaggccccgtggccaactccaaccccaccggctctccgtacgccagccccgcggatgtgctgccagccgcggccgcagcgtcggccgccgccgcctccggcctgctgggccccgccgggctggctggcgtgggggcctttcccgccgcgctgcccgccttctcaggcaccgacctgctggccatcagcacggcgcttaacacgctggcaagttacggctacaacaccaactccctgggcctgggcctcaactcggccgcagcttccggcgtcctggccgccgtggccgccggggccaacccagcagccgccgccgccgccaacctcctggcatcctacgcgggcgaggccggggccgggccagccggaggggccgccccgccgccgcccccgcctcccggagccctggggtcctttgcgttggccgcagccgccaacggctacctcggggccggggcgggcggcggggcgggcggagggggcggcccgctggtggccgctgcagccgcggccggggcggccgggggcttcctgacggcggagaagctggcggctgagagtgccaaggagctggtggagattgcggtgcctgagaacctggtgggagccatcctggggaaggggggcaagacgttggtggagtaccaggagctgacgggcgctcgcatccagatctccaagaagggcgagttcctgccaggcacgcggaaccggcgggtcaccatcacgggcagccccgcggccacgcaagccgctcaatacctcatcagtcagcgggtcacctacgagcagggagtgagggcctcaaacccccagaaagtgggatgaggcctgtggtgtgtgctcccacccttttctctcctcccatctcctcctcttccctctcctcctcccccccaactcctgacctcagcttggtgtagtcctgctcctcttgggatggggctggggtaggcccgactgcaccctccccttctggtagtcataggcaggattgagtgacggttgggaagggggctcagaagccccctccccagcccggaactgacccctccttcctccctccctgtgcttggctgggcctgacccttcctgtcccagggcccaggtctgtgtgatatctgtatatattgcattttgttgattttaatagaaaacaaagcgttattttctctttcaaaaaaaa

SEQ ID NO: 718 - protein, 492 aa, Homo sapiens
MEPEAPDSRKRPLETPPEVVCTKRSNTGEEGEYFLKVLIPSYAAGSIIGKGGQTIVQLQKETGATIKLSKSKDFYPGTTERVCLVQGTAEALNAVHSFIAEKVREIPQAMTKPEVVNILQPQTTMNPDRAKQAKLIVPNSTAGLIIGKGGATVKAVMEQSGAWVQLSQKPEGINLQERVVTVSGEPEQVHKAVSAIVQKVQEDPQSSSCLNISYANVAGPVANSNPTGSPYASPADVLPAAAAASAAAASGLLGPAGLAGVGAFPAALPAFSGTDLLAISTALNTLASYGYNTNSLGLGLNSAAASGVLAAVAAGANPAAAAAANLLASYAGEAGAGPAGGAAPPPPPPPGALGSFALAAAANGYLGAGAGGGAGGGGGPLVAAAAAAGAAGGFLTAEKLAAESAKELVEIAVPENLVGAILGKGGKTLVEYQELTGARIQISKKGEFLPGTRNRRVTITGSPAATQAAQYLISQRVTYEQGVRASNPQKVG

SEQ ID NO: 719 - DNA, 2445 bp, Homo sapiens
  CDS (43)..(2247)
cgccgcggcgcggagtcccggctgcgggatagaccgagggccatggccgcctctcccggacccgccggcgttggcggcgccggagcagtctacggctccggctcttcgggcttcgccctcgactcgggactggagatcaaaactcgctcggtggagcagacgctactcccgctggtttctcagatcaccacgcttattaatcataaagataataccaaaaagtctgataaaactctgcaagcaattcagcgtgtaggacaagctgtcaacttggcagttggaagatttgttaaagtaggagaagctatagccaatgaaaactgggatttgaaagaagaaataaatattgcttgtattgaagctaaacaagcaggagaaacaattgcagcacttacagacataaccaacttgaaccatctggaatctgatgggcagatcacaatttttacagacaaaacaggagtgataaaggctgcaagattacttctttcttcagtgacaaaagtgttgttgctggcagaccgagtagtcattaaacagataataacatcaagaaataaggttctcgcaactatggaaagactagagaaagtgaatagctttcaagagtttgtccaaatattcagtcaatttggaaatgaaatggtggagtttgcacatctgagtggagatagacaaaatgatttgaaagatgaaaagaaaaaggcaaaaatggcagcagctagggcagttcttgaaaagtgtacaatgatgcttctcacagcttcaaagacatgtctgaggcatcctaactgcgaatcagcccataaaaacaaagaaggagtatttgaccgtatgaaagtggcattggataaggtcattgaaattgtgactgactgtaaaccgaatggagagactgacatttcatctatcagtatttttactggaattaaggaattcaagatgaatattgaagctcttcgggagaatctttattttcagtccaaagagaacctttctgtgacattggaagtcatcttggagcgtatggaggactttactgattctgcctacaccagccatgagcacagagaacgcatcttggaactgtcaactcaggcgagaatggaactgcagcagttaatttctgtgtggattcaagctcaaagcaagaaaacaaaaagcatcgctgaagaactggaactcagtattttgaaaatcagtcacagtcttaatgaacttaagaaagaacttcatagtacagcgacacagctggcagcagatctattaaaataccatgctgatcatgtggttctaaaagcattaaaacttactggagtagaaggaaatttagaagctttggctgaatatgcctgtaaactctctgaacagaaagagcagcttgttgagacctgtcgattgttacgacacatatctgggacagaacctctggaaataacctgtatacatgcagaggagacatttcaggtgactggccaacagataatttctgctgctgaaacattgacattgcatccatctagtaaaattgctaaagaaaacctagatgtattttgtgaagcttgggaatcccaaattagtgacatgtcaacactgctgagagaaatcaatgacgtgtttgaaggaagacgaggagagaagtatggctacctttcacttccaaagccaatgaagaataatgcaaacctgaaatcattaaagccagacaagcctgactctgaggagcaagccaagatagcaaagcttggacttaagctgggtttgctcacctctgacgctgactgcgaaattgagaagtgggaagatcaggagaatgagattgttcaatatggacggaacatgtccagtatggcctattctctgtatttatttactagaggagaggggccactgaaaacttcccaggatttaattcatcaactagaggtttttgctgcagagggtttaaagcttacttccagtgttcaagctttttcaaaacagctgaaagacgatgacaagcttatgcttctcctggaaataaacaagctaattcctctatgccaccagctccagacagtaactaagacttctttgcagaataaagtatttctaaaggttgacaagtgtattacgaagacaagatccatgatggctctcttagtccaacttctttcactttgttataaactgctgaagaagcttcagatggaaaataacggatgggtctcagttacaaataaggacactatggatagtaaaacttgagaagcttttggggtcagatctctggaacatcatgtgatgaagctgacatttttaaaaatcaaatgatcctttatcttttcagaaattcatcaattttataaagaaaacaatattgaaattttgctctattttctgatcatgaaactgattgtaaagctttttgacaactaataaatgtcttggtaattgctagattct

SEQ ID NO: 720 - protein, 734 aa, Homo sapiens
MAASPGPAGVGGAGAVYGSGSSGFALDSGLEIKTRSVEQTLLPLVSQITTLINHKDNTKKSDKTLQAIQRVGQAVNLAVGRFVKVGEAIANENWDLKEEINIACIEAKQAGETIAALTDITNLNHLESDGQITIFTDKTGVIKAARLLLSSVTKVLLLADRVVIKQIITSRNKVLATMERLEKVNSFQEFVQIFSQFGNEMVEFAHLSGDRQNDLKDEKKKAKMAAARAVLEKCTMMLLTASKTCLRHPNCESAHKNKEGVFDRMKVALDKVIEIVTDCKPNGETDISSISIFTGIKEFKMNIEALRENLYFQSKENLSVTLEVILERMEDFTDSAYTSHEHRERILELSTQARMELQQLISVWIQAQSKKTKSIAEELELSILKISHSLNELKKELHSTATQLAADLLKYHADHVVLKALKLTGVEGNLEALAEYACKLSEQKEQLVETCRLLRHISGTEPLEITCIHAEETFQVTGQQIISAAETLTLHPSSKIAKENLDVFCEAWESQISDMSTLLREINDVFEGRRGEKYGYLSLPKPMKNNANLKSLKPDKPDSEEQAKIAKLGLKLGLLTSDADCEIEKWEDQENEIVQYGRNMSSMAYSLYLFTRGEGPLKTSQDLIHQLEVFAAEGLKLTSSVQAFSKQLKDDDKLMLLLEINKLIPLCHQLQTVTKTSLQNKVFLKVDKCITKTRSMMALLVQLLSLCYKLLKKLQMENNGWVSVTNKDTMDSKT

SEQ ID NO: 721 - DNA, 5435 bp, Homo sapiens
  CDS (184)..(1005)
ccgcctcgcgccgagactagaagcgctgcgggaagcagggacagtggagagggcgctgcgctcgggctacccaatgcgtggactatctgccgccgctgttcgtgcaatatgctggagctccagaacagctaaacggagtcgccacaccactgtttgtgctggatcgcagcgctgcctttccttatgaagaagacacaaacttggattctcacttgcatttatcttcagctgctcctatttaatcctctcgtcaaaactgaagggatctgcaggaatcgtgtgactaataatgtaaaagacgtcactaaattggtggcaaatcttccaaaagactacatgataaccctcaaatatgtccccgggatggatgttttgccaagtcattgttggataagcgagatggtagtacaattgtcagacagcttgactgatcttctggacaagttttcaaatatttctgaaggcttgagtaattattccatcatagacaaacttgtgaatatagtggatgaccttgtggagtgcgtgaaagaaaactcatctaaggatctaaaaaaatcattcaagagcccagaacccaggctctttactcctgaagaattctttagaatttttaatagatccattgatgccttcaaggactttgtagtggcatctgaaactagtgattgtgtggtttcttcaacattaagtcctgagaaagattccagagtcagtgtcacaaaaccatttatgttaccccctgttgcagccagctcccttaggaatgacagcagtagcagtaataggaaggccaaaaatccccctggagactccagcctacactgggcagccatggcattgccagcattgttttctcttataattggctttgcttttggagccttatactggaagaagagacagccaagtcttacaagggcagttgaaaatatacaaattaatgaagaggataatgagataagtatgttgcaagagaaagagagagagtttcaagaagtgtaattgtggcttgtatcaacactgttactttcgtacattggctggtaacagttcatgtttgcttcataaatgaagcagctttaaacaaattcatattctgtctggagtgacagaccacatctttatctgttcttgctacccatgactttatatggatgattcagaaattggaacagaatgttttactgtgaaactggcactgaattaatcatctataaagaagaacttgcatggagcaggactctattttaaggactgcgggacttgggtctcatttagaacttgcagctgatgttggaagagaaagcacgtgtctcagactgcatgtaccatttgcatggctccagaaatgtctaaatgctgaaaaaacacctagctttattcttcagatacaaactgcagcctgtagttatcctggtctctgcaagtagatttcagcttggatagtgagggtaacaatttttctcaaagggatctggaaaaaatgtttaaaactcagtagtgtcagccactgtacagtgtagaaagcagtgggaactgtgattggatttggcaacatgtcagctttatagttgccgattagtgatatgggtctgatttcgatctcttcctgatgtaaaccatgctcacccatatcccactatacaaatgcaaatggttgcctggttccatttatgcaagggagccagtactgaattatgccttggcagaggggagactccaaaagagtcatcgcaggaagaagttaagaacactgaacatcagaacagtctgccaagaaggacattggcatcctgggaaagtccgccttttcccttgaccactatagggtgtataaatcgtgtttgcaaaatgtgttatgatgtgtttatattctaaaactattacagagctatgtaaagggacttaggagaaaatgctgaatgtaagatggtcccatttcaatttccaccatgggagagcctaaaaataaattatgacatttagtatctaaggttagaaaaccacgcccacatgctaatatgggtgttgaaaactaggttacttataatgcaaggaatcaggaaactttagttatttatagtataatcaccattatctgtttaaaggatccatttagttaaaatcgggcactctatattcattaaggtttatgaattaaaaagaaagctttatgtagttatgcatgtcagtttgctatttaaaatgtgtgacagtgtttgtcatattaagagtgaatttggcaggaattcccaagatggacattgtgcttttaaactagaacttgtaagacattatgtgaatatcccttgccaattttttttataataagaaaacatctgactaaagtcaaagaatgatttcttatggtttattttgatgaaagttcttttaacatgtcttgaatgtacacataaaggaatccaaagctttccattctaacttaatctttgtgataacattattgccatgttctacaaccgtaagatgacagttttcaatgtagtgacacaaaagggcatgaaaaactaactgctagctttcctttcatttcaaaagtccaagaatttctagtatatttggattttagcttctgttcaaagcaaatccagatgcaactccagtaagtggcctttgctcttttttgtaccaaagagcccagatgattcctacagtccctttcttctctaacatgctgtggttccttaaatatgagtaatttctctaagatataacccaggtgctttgagaagctgcattaaggtgttcaggccctcagatatcacatggtacacttgattagtaataaaaccagagatcaatttaaattgctgataggtcctgtctcagtgtgtggcattgactgttttcaggaaaatagatacagattaatatgagttatgcgtgtaggttgtgtatagattgagaagatagatacttctcaatctagtagtttgatttatttaaccaatggtttcagtttgcttgagcatatgaaaatcctgcttaatgtgcttaagagtataataaatgtgtacttttgtcctcaaacctagtagctgggttttaacactcatggacatggtcttaatcaatggagttaaataaacaaattcagcaagttattaaatctgacatggtaggagaggggagatgtgtcctgcttattaaatgtgttggtccattgaaagttacatggattgccaatttttaaaacactaaagttgaataaaatgcatgaacaatagaaaaatgctgaacattattttggatgctagctgcttggacattaactgtgttatttctgctttgagatgaaaatatatatttatctttgcttattttatcccagatgtgttctgaatatccttcttcataaatcatggaaaactcactgctgagatagtaaaccatgaaatcgccttttcagttggtgccatgtatctgacagttccatcttggaaggtttcaaaattaccttttaaaatgatctcagaagtctgtagattctcaatgatactgaaagctttgcacctctttggtagaaaccaggtctatttagaaaatggctttatgataaatgttgcctcctgagtgataatgaagtgttcctggatattgtattgtaatttaatgtgcttaccacactgccacattttaatgagtcagagaaaaattaatttttcttcaatacaataatagaacaagtagcctattctcttaaaaagtatgtgaaaagaaaattatgaaaaaatatgcatacctaatgaagtattggttttagtaagaattaaatacatttcattgagctttaaagtactttggagaaactttggggcacgttttcctactctaattcaactaaagttataaataaagagaaaaactcattcagaaatcatggattttaaaaatattttactgcagccaagttttcatttcaaaatgtaatttcagtttggagcttttaggcattatgtatatttaaaaaatatattcttcaaaaatgcattttggcatggtgggatggatgttgcaaaagatatccggagcctccagtctgtcattaactgatatggtaaatcacctctcttctttgggtctcaattttttatttatctatatggtaaactcagagatcactccttaggggtgagtcctattgcaatatgaccgacaaagaagacaaaatagcattgaaactaacccatacaaaatatccaactctggattctgtgaataagtatcttgaccataaaaagtcattgctgttcttgtttctaatgtaaatagtgtccattagtaaaagtgaaattcagtcttaagtagggtgaattggatcaccatttacacaagagatggctttttcctttgcttgaataaacattttggatcacctccaaagaatgaaaaccagtagtacgttttagtcatattagtcaggatgagaaactataagatgtgtgtaacatttggaaatgcaccaaagtgagcgtttaaatcttctcattttattgaaaactaagagcagaaaatgtaaaatgctcatgaaggttttgaatgccaaaagatattttagaatcaatttataaaggggtaattcattaattacactttaaaattggaaagtgggataagaaatctaaagtaaaccagcttatctttgaaacaatattattttgaaattggctttaaaataaaaccattcagattgaaattctaattagctcatttgtggagtttgatcacacaattcataatgttgctgctttccattaactagtcttgaaatgcctttgtttgtaaaaataaaataatggtactttcattttataacaaggtgtttttttcaagaaataatccatgctaaaatggatatttgtgatcctgaaatgtttactaagcattgtaaatttatttataactgccatctccaactacatccttatgatgtttttaacaataaaattaaaacaactgttaaactaaaaaccacaccgttttccagtacttgatctctgagctacaatactcactaaatataattttccaatcaaaatattctattctatattctaagggttaatatgtgattatagtgtccacttgccaccatttttttaaatcaatggacttgaaaagtattaatttagatggatgcgcagatataccctcagttcagtcatagattggagtttgcatataataatgtaaatgtatgtcgacactattctaaatagttctattatgactgaaatttaattaaataaaaaaggttgtaaaatgtgatgtgtatgtgtatatactgtatgtgtactttttaaaataggtgtatgtcccaacccttttttatacaggtttgaatttaaaattacatgatatatacatatactttattgttctaaataaagaattttatgcactctcataaa

SEQ ID NO: 722 - protein, 273 aa, Homo sapiens
MKKTQTWILTCIYLQLLLFNPLVKTEGICRNRVTNNVKDVTKLVANLPKDYMITLKYVPGMDVLPSHCWISEMVVQLSDSLTDLLDKFSNISEGLSNYSIIDKLVNIVDDLVECVKENSSKDLKKSFKSPEPRLFTPEEFFRIFNRSIDAFKDFVVASETSDCVVSSTLSPEKDSRVSVTKPFMLPPVAASSLRNDSSSSNRKAKNPPGDSSLHWAAMALPALFSLIIGFAFGALYWKKRQPSLTRAVENIQINEEDNEISMLQEKEREFQEV

SEQ ID NO: 723 - DNA, 1832 bp, Homo sapiens
  CDS (50)..(1708)
gctttgcggctgtcgtcggagaggcatctgggttcggactggggccgccatggggaaagtgaatgtggccaagttgcgttacatgagccgagatgacttcagggtcttgaccgcggttgaaatgggcatgaagaaccatgaaattgttcccggcagtttgattgcttctatagccagccttaaacatggtggctgtaataaagttttaagagaattagtgaaacataaactcatagcttgggagcgtaccaaaactgtccagggctatcggttgacaaatgcaggatatgattacctagctttgaaaacactttcttctaggcaagtagttgagtctgttggaaaccagatgggtgttggcaaagaatcagatatttacattgttgcaaatgaagaaggacaacaatttgcattaaagcttcacagactaggaagaacctcgtttcgaaatttgaaaaacaaacgcgattatcataaacataggcacaatgtgtcttggctttatttatctcgtctctctgccatgaaggaatttgcctatatgaaggcattgtatgagaggaaatttccagttccaaagccaattgattacaatcgtcatgcagtggtcatggaactcataaatggttatccactatgtcagatacaccatgttgaagatcctgcatcagtatatgatgaagctatggaactaattgtcaaacttgcaaatcatgggctgattcatggagattttaatgaatttaatctcattttggatgaaagtgaccatatcaccatgattgattttccacagatggtttcaacttctcatcccaatgctgagtggtattttgacagagatgttaaatgcattaaagatttctttatgaaacgtttcagctacgaaagtgagctttttccaacttttaaggatatcaggagagaagacactcttgatgtggaggtttctgccagtggctacacaaaggaaatgcaggcagatgatgaactgcttcatccattaggtccagatgataaaaatattgaaacaaaagagggatctgaattctcattttcagatggagaagtggcagaaaaagcagaggtttacaggtcagaaaatgaaagtgaacggaactgtctagaagaatcagagggctgctattgcagatcatctggagaccctgaacaaataaaggaagacagtttatcagaagagagtgctgatgcacggagttttgaaatgactgaattcaatcaagctttagaagaaataaaagggcaggttgttgaaaacaactctgtaactgaattttctgaggagaaaaacagaactgaaaattacaacaggcaagatggtcagagagttcaaggaggagtccctgctggctctgacgagtatgaagatgaatgccctcatctaattgccttgtcgtcattaaatagagaattcaggcctttcagagatgaagaaaatgtgggagctatgaatcagtatagaacaagaactctgagtatcacttcttcaggcagtgctgtaagctgttcaacaattcctccagaactggtgaaacagaaggtgaaacgtcagttgacaaaacagcaaaaatcagctgtcagacgtcgattgcagaaaggagaagcaaatatatttaccaagcaacgtagggaaaacatgcaaaatatcaaatcaagtttggaagcagctagcttttggggagaataatatatttaggatcttggatatgtttaatatattttttaaagttactgtaattcctttttgagccctcatttgtcttttttgagccaaggctatcatatattaataaataaaccctctttcatct

SEQ ID NO: 724 - protein, 552 aa, Homo sapiens
MGKVNVAKLRYMSRDDFRVLTAVEMGMKNHEIVPGSLIASIASLKHGGCNKVLRELVKHKLIAWERTKTVQGYRLTNAGYDYLALKTLSSRQVVESVGNQMGVGKESDIYIVANEEGQQFALKLHRLGRTSFRNLKNKRDYHKHRHNVSWLYLSRLSAMKEFAYMKALYERKFPVPKPIDYNRHAVVMELINGYPLCQIHHVEDPASVYDEAMELIVKLANHGLIHGDFNEFNLILDESDHITMIDFPQMVSTSHPNAEWYFDRDVKCIKDFFMKRFSYESELFPTFKDIRREDTLDVEVSASGYTKEMQADDELLHPLGPDDKNIETKEGSEFSFSDGEVAEKAEVYRSENESERNCLEESEGCYCRSSGDPEQIKEDSLSEESADARSFEMTEFNQALEEIKGQVVENNSVTEFSEEKNRTENYNRQDGQRVQGGVPAGSDEYEDECPHLIALSSLNREFRPFRDEENVGAMNQYRTRTLSITSSGSAVSCSTIPPELVKQKVKRQLTKQQKSAVRRRLQKGEANIFTKQRRENMQNIKSSLEAASFWGE

SEQ ID NO: 725 - DNA, 1823 bp, Homo sapiens
  CDS (135)..(1589)
cctgggcgggccctgcgtcaggttgcagtttcacttttagctctgggcacctccagctcctgctcgccggacggctcccagggagagcagacgcgccagacgcgccaccctcggggcgccgacggtcacggagcatggggtcggcctttgagcgggtagtccggagagtggtccaggagctggaccatggtggggagttcatccctgtgaccagcctgcagagctccactggcttccagccctactgcctggtggttaggaagccctcaagctcatggttctggaaaccccgttataagtgtgtcaacctgtctatcaaggacatcctggagccggatgccgcggaaccagacgtgcagcgtggcaggagcttccacttctacgatgccatggatgggcagatacagggcagcgtggagctggcagccccaggacaggcaaagatcgcaggcggggccgcggtgtctgacagctccagcacctcaatgaatgtgtactcgctgagtgtggaccctaacacctggcagactctgctccatgagaggcacctgcggcagccagaacacaaagtcctgcagcagctgcgcagccgcggggacaacgtgtacgtggtgactgaggtgctacagacacagaaggaggtggaagtcacgcgcacccacaagcgggagggctcgggccggttttccctgcccggagccacgtgcttgcagggtgagggccagggccatctgagccagaagaagacggtcaccatcccctcaggcagcaccctcgcattccgggtggcccagctggttattgactctgacttggacgtccttctcttcccggataagaagcagaggaccttccagccacccgcgacaggccacaagcgttccacgagcgaaggcgcctggccacagctgccctctggcctctccatgatgaggtgcctccacaacttcctgacagatggggtccctgcggagggggcgttcactgaagacttccagggcctacgggcagaggtggagaccatctccaaggaactggagcttttggacagagagctgtgccagctgctgctggagggcctggagggggtgctgcgggaccagctggccctgcgagccttggaggaggcgctggagcagggccagagccttgggccggtggagcccctggacggtccagcaggtgctgtcctggagtgcctggtgttgtcctccggaatgctggtgccggaactcgctatccctgttgtctacctgctgggggcactgaccatgctgagtgaaacgcagcacaagctgctggcggaggcgctggagtcgcagaccctgttggggccgctcgagctggtgggcagcctcttggagcagagtgccccgtggcaggagcgcagcaccatgtccctgccccccgggctcctggggaacagctggggcgaaggagcaccggcctgggtcttgctggacgagtgtggcctagagctgggggaggacactccccacgtgtgctgggagccgcaggcccagggccgcatgtgtgcactctacgcctccctggcactgctatcaggactgagccaggagccccactagcctgtgcccgggcatggcctggcagctctccagcagggcagagtgtttgcccaccagctgctagccctaggaaggccaggagcccagtagccatgtggccagtctaccatggggcccaggagttggggaaacacaataaaggtggcatacgaaggaaaaaaaaaaaaaaaaaaaaaccaaaaaaaaaaaaaaaaaaaaaaaaaaaaaaaaaaaaaaaaaaaaaaaaaaaaaaaa

SEQ ID NO: 726 - protein, 484 aa, Homo sapiens
MGSAFERVVRRVVQELDHGGEFIPVTSLQSSTGFQPYCLVVRKPSSSWFWKPRYKCVNLSIKDILEPDAAEPDVQRGRSFHFYDAMDGQIQGSVELAAPGQAKIAGGAAVSDSSSTSMNVYSLSVDPNTWQTLLHERHLRQPEHKVLQQLRSRGDNVYVVTEVLQTQKEVEVTRTHKREGSGRFSLPGATCLQGEGQGHLSQKKTVTIPSGSTLAFRVAQLVIDSDLDVLLFPDKKQRTFQPPATGHKRSTSEGAWPQLPSGLSMMRCLHNFLTDGVPAEGAFTEDFQGLRAEVETISKELELLDRELCQLLLEGLEGVLRDQLALRALEEALEQGQSLGPVEPLDGPAGAVLECLVLSSGMLVPELAIPVVYLLGALTMLSETQHKLLAEALESQTLLGPLELVGSLLEQSAPWQERSTMSLPPGLLGNSWGEGAPAWVLLDECGLELGEDTPHVCWEPQAQGRMCALYASLALLSGLSQEPH

SEQ ID NO: 727 - DNA, 2514 bp, Homo sapiens
  CDS (343)..(2139)
cctcgtgccgcagttctgccaccgtcactgagaagctcagcggtagcttttgggaagcaggacgttctcaccaggagagcgtcctctcgagatttctgctccctccattcagggcgtttgggagccaccccttcattttttaaaaaaagtatttctctgtgaccgacggccggggccttctgacggtctgaggtcttgcttgggccagtcacctcctgtcacggtccgcggaggggggaaggataagagggcgaggagctcatcgctcgccacccccgtgggcttcttgggcgcaggtcggagctgggtgggccggctccccggcccctggcttgggcgaccatgtccgcatccgcccagcagctggcggaggagctgcagatcttcggcctagactgcgaggaggctctaattgagaaattggtagagctttgtgttcagtatggacagaatgaggagggaatggtaggcgagcttatagccttctgcaccagcacacataaagttggccttacctcagagatcctgaactcttttgagcatgagtttctgagcaaaagattatcgaaagccaggcatagtacctgcaaggacagtggccatgcaggagctagagacattgtttccattcaagagctaattgaagtggaagaagaagaggaaatcctcttgaactcttacaccacaccttcaaagggttctcagaagcgagctatctctaccccagaaacccccctaacaaaaaggagtgtgtcaactcgtagcccccatcagctactctcaccgtcaagtttctctccaagtgctactccctcccagaaatacaactcacgaagtaaccgaggagaagtggttacctccttcggcttagcacagggagtatcttggtctgggagaggaggagctggaaacatcagcctgaaggtcttgggatgtccagaggcactaactgggagctacaaatccatgtttcagaagctcccagacattcgagaagttctgacctgtaagatagaagaacttggcagcgaactcaaggaacattacaagattgaagctttcactcctttgctagccccagcacaggagcctgtcactctgctgggccagattggctgtgatagcaacgggaagctgaacaacaagtcagtgattctcgagggagaccgggaacattcctcgggtgctcaaattccagtggatttatctgagcttaaggaatattctctgtttcctggacaggttgtaattatggaaggaatcaacaccactggtaggaaacttgttgccaccaaactctacgagggtgtgccacttccattttatcagcccactgaagaggatgcagactttgagcaaagcatggtcctggttgcctgtggaccatacaccacatctgacagcatcacgtatgaccccctgcttgacctgattgctgtcatcaaccatgaccggccagatgtctgcatcctgtttggccctttcctggatgctaagcatgaacaggtggagaattgtctactgacaagtccatttgaagacattttcaagcagtgtctacgaacaattattgaaggcacaagaagctccggctcccaccttgtctttgtcccgtcattgagagatgtgcaccatgagcctgtgtacccccagccgcctttcagctactccgatctgtctcgagaggacaaaaagcaagtacagtttgtgtccgagccctgcagcctctccataaacggagtgatcttcggcttgacatccacagatctgcttttccacctgggggccgaggagatcagtagttcttccggaacttcagacagattcagccgaatactcaagcacatcttgacccagaggagctactacccactctacccgccccaagaagacatggccattgactatgagtcgttctatgtttacgcacagctgcctgtcaccccagatgtcctcatcatcccgtcagagctgaggtacttcgtgaaggatgtcctcggctgtgtctgtgtgaaccctgggcgccttaccaaagggcaggtgggaggcaccttcgcccgactctaccttaggaggccggcagcggacggggcagagaggcagagcccatgcattgctgtgcaggtcgtcaggatctgaggcttctgtcctctgctgttctctgctgtgtgggcccttaaagtcttagccaagagccaagacatagccctgtgacaaggtgaacagttgggtgggaaaggagagaggagccagccagggaggggcagctgcagtgaccaggcccagcagggaggacttgtgcagccgggcctgcctctgagtggtgcctctcctggaaggaagctcttgcttctcagtccatgctccgtgtccagaagtaagccagctgtggatcccgcccactcagaaaaggcgagaaggctttgtgattttctacatgaatcaaacacagaaacaacttttggagaaattaaattctgagtgtgaaaaaaaaaaaaaaaaaaaaaaaaaaaa

SEQ ID NO: 728 - protein, 598 aa, Homo sapiens
MSASAQQLAEELQIFGLDCEEALIEKLVELCVQYGQNEEGMVGELIAFCTSTHKVGLTSEILNSFEHEFLSKRLSKARHSTCKDSGHAGARDIVSIQELIEVEEEEEILLNSYTTPSKGSQKRAISTPETPLTKRSVSTRSPHQLLSPSSFSPSATPSQKYNSRSNRGEVVTSFGLAQGVSWSGRGGAGNISLKVLGCPEALTGSYKSMFQKLPDIREVLTCKIEELGSELKEHYKIEAFTPLLAPAQEPVTLLGQIGCDSNGKLNNKSVILEGDREHSSGAQIPVDLSELKEYSLFPGQVVIMEGINTTGRKLVATKLYEGVPLPFYQPTEEDADFEQSMVLVACGPYTTSDSITYDPLLDLIAVINHDRPDVCILFGPFLDAKHEQVENCLLTSPFEDIFKQCLRTIIEGTRSSGSHLVFVPSLRDVHHEPVYPQPPFSYSDLSREDKKQVQFVSEPCSLSINGVIFGLTSTDLLFHLGAEEISSSSGTSDRFSRILKHILTQRSYYPLYPPQEDMAIDYESFYVYAQLPVTPDVLIIPSELRYFVKDVLGCVCVNPGRLTKGQVGGTFARLYLRRPAADGAERQSPCIAVQVVRI

SEQ ID NO: 729 - DNA, 3160 bp, Homo sapiens
  CDS (284)..(2104)
ccgcagccgccgagccgagcgcttgactatatatggtcaaagctgggggcgagccgcgcgcgggaccgcgcttccgggttcggggcgtccgcaaccacagcgcgcagggcaggcgcgagctggcctctgagccccggcctcggaccgcccactccactcccggcacgcccggtgccgccttccggctccagtccccgggctcggcctcggcgaggtgtaattcgcagcgcgggccggccccggaggctctcggcgagcgcggcgcggtaacaagtgggcgaggatgccgtacgagatcaagaaggtgttcgccagcctcccgcaggtggagaggggcgtctccaagatcatcggcggcgaccctaagggcaacaattttctgtacaccaatggaaagtgcgtcatcctaaggaacatcgacaacccagcccttgctgacatctacacagagcacgcccatcaggtggtggtggccaagtatgcgcccagcggattctacattgcctccggagatgtgtctgggaagctgaggatctgggataccacgcagaaggagcacctgttgaagtatgagtaccagcctttcgctgggaagatcaaagacattgcttggactgaagacagtaagaggatcgccgtggtcggggaaggaagggagaagtttggagcagtcttcctctgggatagtggctcttctgtgggcgagattacaggacacaacaaagtcatcaacagcgtggacatcaagcagagccggccataccggctggccacgggaagcgatgataactgcgcggcattctttgagggacccccattcaagttcaagttcacaattggcgaccacagccgctttgtcaactgtgtgcgattctctcctgatgggaacagatttgccacagccagtgctgacggccagatatacatctatgacgggaagactggggagaaggtgtgcgcgctgggcggaagcaaggcccacgacggtgggatttacgcaattagttggagtcccgacagcacccatttgctttctgcttctggggacaaaacttccaagatttgggacgtcagcgtgaactccgtggtcagcacatttcccatgggctccacggttctggaccagcagctgggctgcctatggcagaaggaccacctgctcagtgtctccctgtccgggtacatcaactatctggacagaaacaaccccagcaagcccctgcacgtcatcaagggtcacagtaaatcgatccagtgtctgacggtgcataaaaacggcggcaagtcctacatttactctgggagccacgacggacacattaattactgggattcagagacgggggagaacgactccttcgctgggaaaggccacacgaaccaggtgtccaggatgaccgtggatgagtcggggcagctcatcagctgcagcatggacgacaccgtgcggtacaccagcctcatgctgcgggactacagcggacaaggagttgtgaaactggacgttcagccaaagtgcgtagccgtcggccccgggggatacgccgtggtcgtgtgcattggacagattgtcctgctgaaggatcagaggaagtgcttcagcatcgacaaccccggctacgagcccgaagttgtggcagtgcaccccggcggggacacggtggcaattgggggtgtggacggcaacgtccgcctgtattccatcctgggcaccacgctgaaggatgagggcaagctcctagaggccaagggccccgtgaccgacgtggcctactcccacgacggcgccttcctcgcggtgtgcgacgccagcaaggtggtcacagtgttcagcgttgctgacggctactcggagaacaatgttttttatggacaccatgcaaaaatcgtctgcctggcctggtccccagacaatgaacactttgcctccggtggcatggacatgatggtgtatgtttggaccctgagtgacccggaaaccagagtcaagatccaagatgcacaccggctgcaccatgtcagcagcctggcctggctggacgagcacacgctggtcacgacctcccatgatgcctctgtcaaggagtggacaatcacctactgaggagccccacccccgcctctggatggaccgaatcagggactagagtttaactgcagcggaacatgtcatttctctatttctgtgacgcgcccccatgcccccaccccaccacaagaggcaggagggcccagtcatgaccctcgtctctgcagggtgtctgtacacgttcttctgaaagctttagacagtaacagtttgcacatgaaaaataaagcgagcacctaaacaatgtgtggagcataactaaaacccacagcccaaccaaaccttgagaatgcgaaacattccagaggcagtagcctccaaagcacacagagcccctggccccgccgcggctctcactatctgtcaggggaggttgtacaggtgaatgagccggggggctcatgttcctgcctgcagaacatttctgtactagtgagaagagggaatatgcattgcagttcagcaaagccggaattctgtgttgaacagatgtctgtctccctagtgtgtgactcacaccttgtggctgccttcagagcgccacctccagatcagatggggacacacaacccctggatatgtttcattgtcagattttgtgcttgattttaagaatggaattgtgggtatctttcctttttttttaatgtatcttaactgttgcctgtcagtgtttacaaactagtgcgttgacggcaccgtgtccaagtttttagaacccttgttagccagaccgaggtgtcctggtcaccgtttcaccatcatgctttgatgttcccctgtctttccctcttctgctctcaagagcaaaggttaatttaaggacaaagatgaagtcactgtaaactaatctgtcattgtttttaccttccttttctttttcagtgcagaaattaaaagtaagtataaagcaccgtgattgggagtgtttttgcgtgtgtcggaatcactggtaaatgttggctgagaacaatccctccccttgcacttgtgaaaacactttgagcgctttaagagattagcctgagaaataattaaatatcttttctcttcaaaaaaaaaaaaaaaaaa

SEQ ID NO: 730 - protein, 606 aa, Homo sapiens
MPYEIKKVFASLPQVERGVSKIIGGDPKGNNFLYTNGKCVILRNIDNPALADIYTEHAHQVVVAKYAPSGFYIASGDVSGKLRIWDTTQKEHLLKYEYQPFAGKIKDIAWTEDSKRIAVVGEGREKFGAVFLWDSGSSVGEITGHNKVINSVDIKQSRPYRLATGSDDNCAAFFEGPPFKFKFTIGDHSRFVNCVRFSPDGNRFATASADGQIYIYDGKTGEKVCALGGSKAHDGGIYAISWSPDSTHLLSASGDKTSKIWDVSVNSVVSTFPMGSTVLDQQLGCLWQKDHLLSVSLSGYINYLDRNNPSKPLHVIKGHSKSIQCLTVHKNGGKSYIYSGSHDGHINYWDSETGENDSFAGKGHTNQVSRMTVDESGQLISCSMDDTVRYTSLMLRDYSGQGVVKLDVQPKCVAVGPGGYAVVVCIGQIVLLKDQRKCFSIDNPGYEPEVVAVHPGGDTVAIGGVDGNVRLYSILGTTLKDEGKLLEAKGPVTDVAYSHDGAFLAVCDASKVVTVFSVADGYSENNVFYGHHAKIVCLAWSPDNEHFASGGMDMMVYVWTLSDPETRVKIQDAHRLHHVSSLAWLDEHTLVTTSHDASVKEWTITY

SEQ ID NO: 731 - DNA, 4077 bp, Homo sapiens
  CDS (229)..(3105)
agtagcgtcgcccgaggctgcagcagcgcatcccggggcatggcgcggcgggggcgcggagggctcggttcggagggggccgggagcccgggcgccctggagtgaggaggaccgggagctggctctggaggctgcggaggcgacgccggagagaacgaagcctcggctgggagcggatctttcgaagatggtttggctgccttggagatttggagatctgatgccacgatgaggactcacacacggggggctcccagtgtgtttttcatatatttgctttgctttgtgtcagcctacatcaccgacgagaacccagaagttatgattcccttcaccaatgccaactacgacagccatcccatgctgtacttctccagggcagaagtggcggagctgcagctcagggctgccagctcgcacgagcacattgcagcccgcctcacggaggctgtgcacacgatgctgtccagccccttggaatacctccctccctgggatcccaaggactacagtgcccgctggaatgaaatttttggaaacaacttgggtgccttggcaatgttctgtgtgctgtatcctgagaacattgaagcccgagacatggccaaagactacatggagaggatggcagcgcagcctagttggttggtgaaagatgctccttgggatgaggtcccgcttgctcactccctggttggttttgccactgcttatgacttcttgtacaactacctgagcaagacacaacaggagaagtttcttgaagtgattgccaatgcctcagggtatatgtatgaaacttcatacaggagaggatggggatttcaatacctgcacaatcatcagcccaccaactgtatggctttgctcacgggaagcctagtcctgatgaatcaaggatatcttcaagaagcctacttatggaccaaacaagttctgaccatcatggagaaatctctggtcttgctcagggaggtgacggatggctccctctatgaaggagttgcgtatggcagctacaccactagatcactcttccaatacatgtttctcgtccagaggcacttcaacatcaaccactttggccatccgtggcttaaacaacactttgcatttatgtatagaaccatcctgccagggtttcaaaggactgtggctattgcggactcaaattacaactggttttatggtccagaaagccaattagtgttccttgataaatttgtcatgcgtaatggcagtggtaactggctagctgaccaaatcagaaggaaccgtgtggtggaaggtccaggaacaccatccaaagggcagcgctggtgcactctgcacacagaatttctctggtatgatggcagcttgaaatcggttcctcctccagactttggcacccctacactgcattattttgaagactggggtgtcgtgacttatggaagtgcactacctgcagaaatcaatagatctttcctttccttcaagtctggaaaactggggggacgtgcaatatatgacattgtccacagaaacaaatacaaagattggatcaaaggatggagaaattttaatgcagggcatgaacatcctgatcaaaactcatttacttttgctcccaatggtgtgcctttcattactgaggctctgtacgggccaaagtacaccttcttcaacaatgttttgatgttttccccagctgtgtcaaagagctgcttttctccctgggtgggtcaggtcacagaagactgctcatcaaaatggtctaaatacaagcatgacctggcagctagttgtcaggggagggtggttgcagcagaggagaaaaatggggtggttttcatccgaggagaaggtgtgggagcttataacccccagctcaacctgaagaatgttcagaggaatctcatcctcctacatccacagctgcttctccttgtagaccaaatacacctgggagaggagagtcccttggagacagcagcgagcttcttccataatgtggatgttccttttgaggagactgtggtagatggtgtccatggggctttcatcaggcagagagatggtctctataaaatgtactggatggacgatactggctacagcgagaaagcaacctttgcctcagtgacatatcctcggggctatccctacaacgggacaaactatgtgaatgtcaccatgcacctccgaagtcccatcaccagggcagcttacctcttcatagggccatctatagatgttcagagcttcactgtccacggagactctcagcaactggatgtgttcatagccaccagcaaacatgcctacgccacatacctgtggacaggtgaggccacaggacagtctgcctttgcacaggtcattgctgatcgtcacaaaattctgtttgaccggaattcagccatcaagagcagcattgtccctgaggtgaaggactatgctgctattgtggaacagaacttgcagcattttaaaccagtgtttcagctgctggagaagcagatactgtcccgagtccggaacacagctagctttaggaagactgctgaacgcctgctgagattttcagataagagacagactgaggaggccattgacaggatttttgccatatcacagcaacagcagcagcaaagcaagtcaaagaaaaaccgaagggcaggcaaacgctataaatttgtggatgctgtccctgatatttttgcacagattgaagtcaatgagaaaaagattagacagaaagctcagattttggcacagaaagaactacccatagatgaagatgaagaaatgaaagaccttttagattttgcagatgtaacatacgagaaacataaaaatgggggcttgattaaaggccggtttggacaggcacggatggtgacaactacacacagcagggccccatcactgtctgcttcctataccaggttgttcctgattctgaacattgctattttctttgtcatgttggcaatgcaactgacttatttccagagggcccagagcctacatggccaaagatgtctttatgcagttcttctcatagatagctgtattttattatggttgtactcttcttgttcccaatcacagtgttagcactgaagctataaattacctggtcattttgtgatcacaagagtctatgcaaaaaaaaaaatttctttaccccagattatcagatttttttccctcagattcattttaacaaattaagggaagatattttgacacaagaaagcaggaacgtggagaaattggagcaggaaaagaaattatcaaagcaatagaaatagcttggtggtcctatggtgtttttggaagtatttggcattgctaattgagcagtccatatagtactacttttagaagaaacaaaaagtctattttttaaagtaatgttttttcttatgagaaaaaggtttagatagaattgggttttattaatattaatttaatgctattagcaatttccatatactatattgtggaaaagactgaagaatacaattctgagaaatataaaaaaattttaatggtatactcatgttgaaagataaatgttgctaagtcctggtatgatggtgtgagcttccttggggaagtacttcttgagttatgtaactaacaggatgttttactacagatctggatggctattcagataacatggcaaaaaatgatagcagaagatcattaaaaacttaaaatatattttattagaaaacatttatctatgaatgaatatttccttgatgctggtctctgcacacatatgcttggttacttgcatgcattcattggttgttcaataagtgagatgattacagataatactgtattttccttatatggaaaaccgttatagacccaataacaactaaacctttcaaaagaaaatattttctattatgaatgttgattttcataccaaagaagatggagagtctaaaatttggatatgattcttatgtttttttaatagaaaaccttcttcaagtttattttcctaaataaacatcataattgtgaaaaaaaaaaaaaaaaaaaaaaaaaaaaaaaaaaaaaaaa

SEQ ID NO: 732 - protein, 958 aa, Homo sapiens [sequence omitted]

SEQ ID NO: 733 - DNA, 7650 bp, Homo sapiens
  CDS (270)..(3392)
acacacacgcgccctcacccgccaccgccgccgcggccgccgccgcacccggacagcgagcggctgaggccgccagggcccaaaggacagcggcccagacaggggctggcggcccggccggccccggctcaccgactcgggcagcatccacctgccccagccaacacccttctctcgccccaggtcctttctcagcctccagctgggctgtccccaagctgagctgaggctcttctcctccgatccccacctctgcccggacatccaccatggggacagccaccaggaggaagccacacctgctgctggtagctgctgtggcccttgtctcctcttcagcttggagttcagccctgggatcccaaaccaccttcgggcctgtctttgaagaccagcccctcagtgtgctattcccagaggagtccacggaggagcaggtgttgctggcatgccgcgcccgggccagccctccagccacctatcggtggaagatgaatggtaccgagatgaagctggagccaggttcccgtcaccagctggtggggggcaacctggtcatcatgaaccccaccaaggcacaggatgccggggtctaccagtgcctggcctccaacccagtgggcaccgttgtcagcagggaggccatcctccgcttcggctttctgcaggaattctccaaggaggagcgagacccagtgaaagctcatgaaggctggggggtgatgttgccctgtaacccacctgcccactacccaggcttgtcctaccgctggctcctcaacgagttccccaacttcatcccgacggacgggcgtcacttcgtgtcccagaccacagggaacctgtacattgcccgaaccaatgcctcagacctgggcaactactcctgtttggccaccagccacatggacttctccaccaagagcgtcttcagcaagtttgctcagctcaacctggctgctgaagatacccggctctttgcacccagcatcaaggcccggttcccagcagagacctatgcactggtggggcagcaggtcaccctggagtgcttcgcctttgggaaccctgtcccccggatcaagtggcgcaaagtggacggctccctgtccccgcagtggaccacagctgagcccaccctgcagatccccagcgtcagctttgaggatgagggcacctacgagtgtgaggcggagaactccaagggccgagacaccgtgcagggccgcatcatcgtgcaggctcagcctgagtggctaaaagtgatctcggacacagaggctgacattggctccaacctgcgttggggctgtgcagccgccggcaagccccggcctacagtgcgctggctgcggaacggggagcctctggcctcccagaaccgggtggaggtgttggctggggacctgcggttctccaagctgagcctggaagactcgggcatgtaccagtgtgtggcagagaataagcacggtaccatctacgccagcgccgagctagccgtgcaagcactcgcccctgacttcaggctgaatcccgtgaggcgtctgatccccgcggcccgcgggggagagatccttatcccctgccagccccgggcagctccaaaggccgtggtgctctggagcaaaggcacggagattttggtcaacagcagcagagtgactgtaactccagatggcaccttgatcataagaaacatcagccggtcagatgaaggcaaatacacctgctttgctgagaacttcatgggcaaagccaacagcactggaatcctatctgtgcgagatgcaaccaaaatcactctagccccctcaagtgccgacatcaacttgggtgacaacctgaccctacagtgccatgcctcccacgaccccaccatggacctcaccttcacctggaccctggacgacttccccatcgactttgataagcctggagggcactaccggagaactaatgtgaaggagaccattggggatctgaccatcctgaacgcccagctgcgccatggggggaagtacacgtgcatggcccagacggtggtggacagcgcgtccaaggaggccacagtcctggtccgaggtccgccaggtcccccaggaggtgtggtggtgagggacattggcgacaccaccatccagctcagctggagccgtggcttcgacaaccacagccccatcgctaagtacaccctgcaagctcgcactccacctgcagggaagtggaagcaggttcggaccaatcctgcaaacatcgagggcaatgccgagactgcacaggtgctgggcctcaccccctggatggactatgagttccgggtcatagccagcaacattctgggcactggggagcctagtgggccctccagcaaaatccggaccagggaagcagccccctcggtggcaccctcaggactcagcggaggaggtggagcccccggagagctcatcgtcaactggacgcccatgtcacgggagtaccagaacggagacggcttcggctacctgctgtccttccgcaggcagggcagcactcactggcagaccgcccgggtgcctggcgccgatgcccagtactttgtctacagcaacgagagcgtccggccctacacgccctttgaggtcaagatccgcagctacaaccgccgcggggatgggcccgagagcctcactgcactcgtgtactcagctgaggaagagcccagggtggcccctaccaaggtgtgggccaaaggggtctcatcctcagagatgaacgtgacctgggaacccgtgcagcaggacatgaatggtatcctcctggggtatgagatccgctactggaaagctggggacaaagaagcagctgcggaccgagtgaggacagcagggctggacaccagtgcccgagtcagcggcctgcatcccaacaccaagtaccatgtgaccgtgagggcctacaaccgggctggcactgggcctgccagcccttctgccaacgccacgaccatgaagccccctccgcggcgacctcctggcaacatctcctggactttctcaagctctagtcttagcattaagtgggaccctgtggtccctttccgaaatgagtctgcagtcaccggctataagatgctgtaccagaatgacttacacctgactcccacgctccacctcaccggcaagaactggatagaaatcccagtgcctgaagacattggccatgccctggtacaaattcggaccacagggcccggaggggatgggatccctgcagaagtccacatcgtgaggaatggaggcacaagcatgatggtggagaacatggcagtccgcccagcaccacaccctggcaccgtcatttcccactccgtggcgatgctgatcctcataggctccctggagctctgatcctggaacccctccctctgcgccgcagctggacgccacctccgacggacacagccagccccttcctgctgccaaggtggcctgacactgtgccagagagtggctggttttaaatacctactttaaacagtgccctttttgtaggaggtaggatattttatattctgccgcaggatagaacccacgcaaggattttctttaaattgagaggcaccaggcagtaacttccatgatgacactgacgcctatacctgagctctaggctgcctggagggaaggaacaggcccatgggaagaagggggttttaaaaacatgtcttcaactcagcagagatggccctctgggaccctatacggactccgccacttgagagcagtcctaggcccggcaggaacaccagacatgaacaggttgaagaactggagcgaagtgcacacctcaccatccttcagtctaaggaagaagggcaagccctgggaccaagagctctcccgccttctccctcgagcagcagcaaggaccctgacgctgtccccgataactccctaggggctcctgcctgcccaagcggctgagaaccagcgccccgatgcctgaggctgggagcctgagccccttcagctttgaggggggtgatactccaggctgtttggggtgggagccaaaaagagttgagaggccagggcccttggtggaaaggggcaccagccttggtctgagatagtcacaacccaggtgacgatgccctctcagccaacactgccaacctgaccctgtcatcccgattgacagcgccacttcaggtggctgggtgactaaagggcttgtcttggtggggtctcccacccctccaagacccattctgcacagtccctccagggtttgggcaggagatggccaatcatgcgcccacctctccagtgctgcctgcagtcagctcggcctccccgacctgcagccccagactctgctctcccagcactgactcactcctgcctgggaggggaatgcagcattcatgctgtgtgtcctggtattgggaggtttctgggaagggcagaggataaatgtggccctgcctgctcccaggtatacctaggaccacctggccagatccgctcccagacggccttggactgcttgcatttccccggagaaaaaggggttaataaatgggccatcctttcctgagctctgggtatactaccagtcacagaacgtcagagctggaagaagccttagagctcaacttcttcaagcccctcactttacagatgaggaaatggaggtggtccagagagggtctgggattcccaaggtcacacagcccagaagagatggggctgggttaagaactcgagtcttccacctttctgttcaaggctgtttgtctacccagaggaaggaggcactgctgaatggctatggcctggctaagaaggtgattagtcagtagggtgtgaaaattctacttcaaggggttcggattggtgatcatggggattggcatggctgggttcccgtccaaggtgtgggcagagcttctaccaaacttcaacatggagggctgacttgaagctccctgtccccctcactcttgccccaagaaaagaggccaaagcaagagcagattccctaggcaagagcagcagcacaactaggaaaccccaaagcccatgctccgacaggtggcccttcacagggggcagcgggacaggcatcttgaagggcatatgtcctcggaagctccgagcctgttttctgtagtttatagttagagctctattttgttatggttttttaaacttttaagtcctgctctattttcctgggcaggtttatgttgatgtttacccactacaattttttaaaaatataagctcacatgccttttccctgccacagccaaacccccactgcaccctacccacccacccctagcccaggtcagctttcctggagctggctaatgaaagcctcctcacctcttcccaacccttacaagcaagggtgctaggggctcagctatacgaccattctccctgacagggagtccaaacttggcctagcatccctcctggcccccctctggccacgacttggcctgtgcctggttctctatcagaaaggggatgctgaacaaaacctccttccaagttttatccaattcgttcctcattgcctcgggctgcgtcaggggaagcaggggacaggtgtccagttgctgggccgagggaggagctggtttggcataggacctaaccagtgaagctagaggctacagccactaaacttgcttcaggccaacgatagttactcacaagtaagtaccttaatgctaatgaggtccactaaaaaggggaggaaggcagacctcctgggagacccacgaagggtttttagccagggaaaactgagccccaggaaaacctaaccactgggcaggcagaatttgtttgagggatagaacgacaacaaaataaatgttcctgcagcctgagatttcaggtagagtactgactaaggtttaataagacaataggtgacctgaggacatgcaagcttgtaaaatgcaacagcctcctgctagagtgacttgtacatgagcttgcttgcagaagactagattagatgtttctcaggatcccctcctgcgcaggggttctctgattttcgtgttctctgcccagatgggctgggggagttgagagtgtgcttattttcactgcgatcatgagaccacagttctgggttatctcctctcatacatcaagccccagaggaggcggcaagaggaacagccacaaacaagtactttaccccacagcttagtggccagtaaacaccctggggactaggaaaaggaaccaactgtaggcacctctccagggcctagggagacaagtgtcctctcttctgcatacatttgggctccccttacagagccctttgccctggctctctggtccttgttgctctaacagtccagatgtacacccagcctcagggggaaggcagctctctccagacagagtctcagggcccagcaaggtcaggttatctgctttcattcagggcaacaaatgatacaaatggtgccagggagtggcaaggccatgggggtaggtgggggtgtctttttcttttcataaagtaacaacagacgagactgaggttaaacatcagaaaaaaacctctggaatgaccttcctcattccaggaggccctggaataaggaagaggcttctttctgagggagctttgaggaattttgacagctgttgacatgggatttgggaaaggtgaagctgtgactggaggggcaggagatggtccaagtgtccatccagagatgagactcttagaatcaaagtgttcagcccaggaagtcttggagatcccaccttctgtggccctgcaccttatgggaagccattaagggggctcatctaggaattctggttacagcccagtgctcatcccagcgtatgctgcctctttagggcagccccaagggccagccagcctgtactctgggcaagagcccaaaatggctaggaatgtttgactcccttaatctcttccccagctacagaggaatcttttctctgcctggtctcagaatgggactgccaactggctcattggtgggagacacagtatcctcaaacctgtggccactggcatgacagtggtgctctgtctccctgggtgacacccaccctaggcttcctcctggatgtgatggggattgccagagaggctcttagcataaaaggcattaggtgggcatttttctgtgtgcccccaaaaagctccatggaaacaggcacctggtagctgcggaacacccgtggacttgtgtatatggtcataggctttgggaagacaggacgtaaaggaaaatgagagaaacaaaatgggtcagatagctttggccacagccccaggcagcctttggggcctatgacacttagtgcccttagatgggatacatcttgcctcggccccaagactcctccaacttacccgtcccatccagggcctgcacagcttagagaggctcacagcttggcaaatgctagggcttcatcagaccactgacttgactcagtgtttgttaaaatggaaccactcccgttggcctactgtttctctcctgtacttcttgtaatgatagttatttattgactctggtagcaggcagttcttaaataaagatggtttctcaacctgttggggaaaaaaaaaaaaaaa

SEQ ID NO: 734 - protein, 1040 aa, Homo sapiens
MGTATRRKPHLLLVAAVALVSSSAWSSALGSQTTFGPVFEDQPLSVLFPEESTEEQVLLACRARASPPATYRWKMNGTEMKLEPGSRHQLVGGNLVIMNPTKAQDAGVYQCLASNPVGTVVSREAILRFGFLQEFSKEERDPVKAHEGWGVMLPCNPPAHYPGLSYRWLLNEFPNFIPTDGRHFVSQTTGNLYIARTNASDLGNYSCLATSHMDFSTKSVFSKFAQLNLAAEDTRLFAPSIKARFPAETYALVGQQVTLECFAFGNPVPRIKWRKVDGSLSPQWTTAEPTLQIPSVSFEDEGTYECEAENSKGRDTVQGRIIVQAQPEWLKVISDTEADIGSNLRWGCAAAGKPRPTVRWLRNGEPLASQNRVEVLAGDLRFSKLSLEDSGMYQCVAENKHGTIYASAELAVQALAPDFRLNPVRRLIPAARGGEILIPCQPRAAPKAVVLWSKGTEILVNSSRVTVTPDGTLIIRNISRSDEGKYTCFAENFMGKANSTGILSVRDATKITLAPSSADINLGDNLTLQCHASHDPTMDLTFTWTLDDFPIDFDKPGGHYRRTNVKETIGDLTILNAQLRHGGKYTCMAQTVVDSASKEATVLVRGPPGPPGGVVVRDIGDTTIQLSWSRGFDNHSPIAKYTLQARTPPAGKWKQVRTNPANIEGNAETAQVLGLTPWMDYEFRVIASNILGTGEPSGPSSKIRTREAAPSVAPSGLSGGGGAPGELIVNWTPMSREYQNGDGFGYLLSFRRQGSTHWQTARVPGADAQYFVYSNESVRPYTPFEVKIRSYNRRGDGPESLTALVYSAEEEPRVAPTKVWAKGVSSSEMNVTWEPVQQDMNGILLGYEIRYWKAGDKEAAADRVRTAGLDTSARVSGLHPNTKYHVTVRAYNRAGTGPASPSANATTMKPPPRRPPGNISWTFSSSSLSIKWDPVVPFRNESAVTGYKMLYQNDLHLTPTLHLTGKNWIEIPVPEDIGHALVQIRTTGPGGDGIPAEVHIVRNGGTSMMVENMAVRPAPHPGTVISHSVAMLILIGSLEL

SEQ ID NO: 735 - DNA, 1682 bp, Homo sapiens
  CDS (154)..(1440)
ggaatggctgaaaaagcccacacctggaaatcactccctccctgctcctccacggcaggttgcatctgcgagacgcttcggtcattagaggaatgagccgggagtgagcaattcaccagctctccagcacttggtggaaagcagcaggcaaggatggatgtggttgacagccttcttgtgaatggaagcaacatcactcctccctgtgaactcgggctcgaaaatgagacgcttttctgcttggatcagccccgtccttccaaagagtggcagccagcggtgcagattctcttgtactccttgatattcctgctcagcgtgctgggaaacacgctggtcatcaccgtgctgattcggaacaagcggatgcggacggtcaccaacatcttcctcctctccctggctgtcagcgacctcatgctctgtctcttctgcatgccgttcaacctcatccccaatctgctcaaggatttcatcttcgggagcgccgtttgcaagaccaccacctacttcatgggcacctctgtgagtgtatctacctttaatctggtagccatatctctagagagatatggtgcgatttgcaaacccttacagtcccgggtctggcagacaaaatcccatgctttgaaggtgattgctgctacctggtgcctttcctttaccatcatgactccgtaccccatttatagcaacttggtgccttttaccaaaaataacaaccagaccgcgaatatgtgccgctttctactgccaaatgatgttatgcagcagtcctggcacacattcctgttactcatcctctttcttattcctggaattgtgatgatggtggcatatggattaatctctttggaactctaccagggaataaaatttgaggctagccagaagaagtctgctaaagaaaggaaacctagcaccaccagcagcggcaaatatgaggacagcgatgggtgttacctgcaaaagaccaggcccccgaggaagctggagctccggcagctgtccaccggcagcagcagcagggccaaccgcatccggagtaacagctccgcagccaacctgatggccaagaaaagggtgatccgcatgctcatcgtcatcgtggtcctcttcttcctgtgctggatgcccatcttcagcgccaacgcctggcgggcctacgacaccgcctccgcagagcgccgcctctcaggaacccccatttccttcatcctcctcctgtcctacacctcctcctgcgtcaaccccatcatctactgcttcatgaacaaacgcttccgcctcggcttcatggccaccttcccctgctgccccaatcctggtcccccaggggcgaggggagaggtgggggaggaggaggaaggcgggaccacaggagcctctctgtccaggttctcgtacagccatatgagtgcctcggtgccaccccagtgagatgtcccctgaccctccaccgcagaaggaaggcagggaggaggcagagaagaaagaacggaagaagagatcaggaagagaaggagcagagctgatggagaaggaaggctccatctccagtgggaactcttcaaggtctgcttttcatccttcatctggattccagagcactgctccagtggggccatgattggtttctaggcagttcaaagcaggatatgttaagtaacactcaccatcag

SEQ ID NO: 736 - protein, 428 aa, Homo sapiens
MDVVDSLLVNGSNITPPCELGLENETLFCLDQPRPSKEWQPAVQILLYSLIFLLSVLGNTLVITVLIRNKRMRTVTNIFLLSLAVSDLMLCLFCMPFNLIPNLLKDFIFGSAVCKTTTYFMGTSVSVSTFNLVAISLERYGAICKPLQSRVWQTKSHALKVIAATWCLSFTIMTPYPIYSNLVPFTKNNNQTANMCRFLLPNDVMQQSWHTFLLLILFLIPGIVMMVAYGLISLELYQGIKFEASQKKSAKERKPSTTSSGKYEDSDGCYLQKTRPPRKLELRQLSTGSSSRANRIRSNSSAANLMAKKRVIRMLIVIVVLFFLCWMPIFSANAWRAYDTASAERRLSGTPISFILLLSYTSSCVNPIIYCFMNKRFRLGFMATFPCCPNPGPPGARGEVGEEEEGGTTGASLSRFSYSHMSASVPPQ

SEQ ID NO: 737 - DNA, 3809 bp, Homo sapiens
  CDS (311)..(3055)
tctgccccttccccccgcccccgcccgcctcggctcccgcagcgctagtgtgtccgcctagttcagtgtgcgtggagattaggtccaagcgcccgcccagaggcaggcagtccgcgagcccagccgccgctgtcgccgccagtagcagccttcgccagcagcgccgcggcggaaccgggcgcaggggagcgagcccggccccgccagcccagcccagcccagccctactccctccccacgccagggcagcagccgttgctcagagagaaggtggaggaagaaatccagaccctagcacgcgcgcaccatcatggaccattatgattctcagcaaaccaacgattacatgcagccagaagaggactgggaccgggacctgctcctggacccggcctgggagaagcagcagagaaagacattcacggcatggtgtaactcccacctccggaaggcggggacacagatcgagaacatcgaagaggacttccgggatggcctgaagctcatgctgctgctggaggtcatctcaggtgaacgcttggccaagccagagcgaggcaagatgagagtgcacaagatctccaacgtcaacaaggccctggatttcatagccagcaaaggcgtcaaactggtgtccatcggagccgaagaaatcgtggatgggaatgtgaagatgaccctgggcatgatctggaccatcatcctgcgctttgccatccaggacatctccgtggaagagacttcagccaaggaagggctgctcctgtggtgtcagagaaagacagccccttacaaaaatgtcaacatccagaacttccacataagctggaaggatggcctcggcttctgtgctttgatccaccgacaccggcccgagctgattgactacgggaagctgcggaaggatgatccactcacaaatctgaatacggcttttgacgtggcagagaagtacctggacatccccaagatgctggatgccgaagacatcgttggaactgcccgaccggatgagaaagccatcatgacttacgtgtctagcttctaccacgccttctctggagcccagaaggcggagacagcagccaatcgcatctgcaaggtgttggccgtcaaccaggagaacgagcagcttatggaagactacgagaagctggccagtgatctgttggagtggatccgccgcacaatcccgtggctggagaaccgggtgcccgagaacaccatgcatgccatgcaacagaagctggaggacttccgggactaccggcgcctgcacaagccgcccaaggtgcaggagaagtgccagctggagatcaacttcaacacgctgcagaccaagctgcggctcagcaaccggcctgccttcatgccctctgagggcaggatggtctcggacatcaacaatgcctggggctgcctggagcaggtggagaagggctatgaggagtggttgctgaatgagatccggaggctggagcgactggaccacctggcagagaagttccggcagaaggcctccatccacgaggcctggactgacggcaaagaggccatgctgcgacagaaggactatgagaccgccaccctctcggagatcaaggccctgctcaagaagcatgaggccttcgagagtgacctggctgcccaccaggaccgtgtggagcagattgccgccatcgcacaggagctcaatgagctggactattatgactcacccagtgtcaacgcccgttgccaaaagatctgtgaccagtgggacaatctgggggccctaactcagaagcgaagggaagctctggagcggaccgagaaactgctggagaccattgaccagctgtacttggagtatgccaagcgggctgcacccttcaacaactggatggagggggccatggaggacctgcaggacaccttcattgtgcacaccattgaggagatccagggactgaccacagcccatgagcagttcaaggccaccctccctgatgccgacaaggagcgcctggccatcctgggcatccacaatgaggtgtccaagattgtccagacctaccacgtcaatatggcgggcaccaacccctacacaaccatcacgcctcaggagatcaatggcaaatgggaccacgtgcggcagctggtgcctcggagggaccaagctctgacggaggagcatgcccgacagcagcacaatgagaggctacgcaagcagtttggagcccaggccaatgtcatcgggccctggatccagaccaagatggaggagatcgggaggatctccattgagatgcatgggaccctggaggaccagctcagccacctgcggcagtatgagaagagcatcgtcaactacaagccaaagattgatcagctggagggcgaccaccagctcatccaggaggcgctcatcttcgacaacaagcacaccaactacaccatggagcacatccgtgtgggctgggagcagctgctcaccaccatcgccaggaccatcaatgaggtagagaaccagatcctgacccgggatgccaagggcatcagccaggagcagatgaatgagttccgggcctccttcaaccactttgaccgggatcactccggcacactgggtcccgaggagttcaaagcctgcctcatcagcttgggttatgatattggcaacgacccccagaagaagacaggcatgatggacacggatgatttccgcgcctgcctgatctccatgggttacaacatgggagaagcagaatttgcccgcatcatgagcattgtggaccccaaccgcctgggggtagtgacattccaggccttcattgacttcatgtcccgcgagacagccgacacagatacagcagaccaagtcatggcttccttcaagatcctggctggggacaagaactacattaccatggacgagctgcgccgcgagctgccacccgaccaggctgagtactgcatcgcgcggatggccccctacaccggccccgactccgtgccaggtgctctggactacatgtccttctccacggcgctgtacggcgagagtgacctctaatccaccccgcccggccgccctcgtcttgtgcgccgtgccctgccttgcacctccgccgtcgcccatctcctgcctgggttcggtttcagctcccagcctccacccgggtgagctggggcccacgtggcatcgatcctccctgcccgcgaagtgacagtttacaaaattattttctgcaaaaaagaaaaaaaagttacgttaaaaaccaaaaaactacatattttattatagaaaaagtattttttctccaccagacaaatggaaaaaaagaggaaagattaactatttgcaccgaaatgtcttgttttgttgcgacataggaaaataaccaagcacaaagttatattccatcctttttactgatttttttttcttctatctgttccatctgctgtattcatttctccaatctcatgtccattttggtgtgggagtcggggtagggggtactcttgtcaaaaggcacattggtgcatgtgtgtttgctagctcacttgtccatgaaaatattttatgatattaaagaaaatcttttgaaatggctgttttttaaggaagagaatttatgtggcttctcatttttaaatcccctcagaggtgtgactagtctctttatcagcacacacttaaaaaatttttaatattgtctattaaaaataggacaaacttggagagtatggacaactttgatattgcttggcacagatggtattaaaaaaaccacactcctatgacaaaaaaaaaaaaaaaaaaa

SEQ ID NO: 738 - protein, 914 aa, Homo sapiens
MDHYDSQQTNDYMQPEEDWDRDLLLDPAWEKQQRKTFTAWCNSHLRKAGTQIENIEEDFRDGLKLMLLLEVISGERLAKPERGKMRVHKISNVNKALDFIASKGVKLVSIGAEEIVDGNVKMTLGMIWTIILRFAIQDISVEETSAKEGLLLWCQRKTAPYKNVNIQNFHISWKDGLGFCALIHRHRPELIDYGKLRKDDPLTNLNTAFDVAEKYLDIPKMLDAEDIVGTARPDEKAIMTYVSSFYHAFSGAQKAETAANRICKVLAVNQENEQLMEDYEKLASDLLEWIRRTIPWLENRVPENTMHAMQQKLEDFRDYRRLHKPPKVQEKCQLEINFNTLQTKLRLSNRPAFMPSEGRMVSDINNAWGCLEQVEKGYEEWLLNEIRRLERLDHLAEKFRQKASIHEAWTDGKEAMLRQKDYETATLSEIKALLKKHEAFESDLAAHQDRVEQIAAIAQELNELDYYDSPSVNARCQKICDQWDNLGALTQKRREALERTEKLLETIDQLYLEYAKRAAPFNNWMEGAMEDLQDTFIVHTIEEIQGLTTAHEQFKATLPDADKERLAILGIHNEVSKIVQTYHVNMAGTNPYTTITPQEINGKWDHVRQLVPRRDQALTEEHARQQHNERLRKQFGAQANVIGPWIQTKMEEIGRISIEMHGTLEDQLSHLRQYEKSIVNYKPKIDQLEGDHQLIQEALIFDNKHTNYTMEHIRVGWEQLLTTIARTINEVENQILTRDAKGISQEQMNEFRASFNHFDRDHSGTLGPEEFKACLISLGYDIGNDPQKKTGMMDTDDFRACLISMGYNMGEAEFARIMSIVDPNRLGVVTFQAFIDFMSRETADTDTADQVMASFKILAGDKNYITMDELRRELPPDQAEYCIARMAPYTGPDSVPGALDYMSFSTALYGESDL

SEQ ID NO: 739 - DNA, 1763 bp, Homo sapiens
  CDS (142)..(1503)
cttctggtaaggaggccccgtgatcagctccagccatttgcagtcctggctatcccaggagcttacataaagggacaattggagcctgagaggtgacagtgctgacactacaaggctcggagctccgggcactcagacatcatgagttggtccttgcacccccggaatttaattctctacttctatgctcttttatttctctcttcaacatgtgtagcatatgttgctaccagagacaactgctgcatcttagatgaaagattcggtagttattgtccaactacctgtggcattgcagatttcctgtctacttatcaaaccaaagtagacaaggatctacagtctttggaagacatcttacatcaagttgaaaacaaaacatcagaagtcaaacagctgataaaagcaatccaactcacttataatcctgatgaatcatcaaaaccaaatatgatagacgctgctactttgaagtccaggaaaatgttagaagaaattatgaaatatgaagcatcgattttaacacatgactcaagtattcgatatttgcaggaaatatataattcaaataatcaaaagattgttaacctgaaagagaaggtagcccagcttgaagcacagtgccaggaaccttgcaaagacacggtgcaaatccatgatatcactgggaaagattgtcaagacattgccaataagggagctaaacagagcgggctttactttattaaacctctgaaagctaaccagcaattcttagtctactgtgaaatcgatgggtctggaaatggatggactgtgtttcagaagagacttgatggcagtgtagatttcaagaaaaactggattcaatataaagaaggatttggacatctgtctcctactggcacaacagaattttggctgggaaatgagaagattcatttgataagcacacagtctgccatcccatatgcattaagagtggaactggaagactggaatggcagaaccagtactgcagactatgccatgttcaaggtgggacctgaagctgacaagtaccgcctaacatatgcctacttcgctggtggggatgctggagatgcctttgatggctttgattttggcgatgatcctagtgacaagtttttcacatcccataatggcatgcagttcagtacctgggacaatgacaatgataagtttgaaggcaactgtgctgaacaggatggatctggttggtggatgaacaagtgtcacgctggccatctcaatggagtttattaccaaggtggcacttactcaaaagcatctactcctaatggttatgataatggcattatttgggccacttggaaaacccggtggtattccatgaagaaaaccactatgaagataatcccattcaacagactcacaattggagaaggacagcaacaccacctggggggagccaaacaggtcagaccagagcaccctgcggaaacagaatatgactcactttaccctgaggatgatttgtagaaaattaactgctaacttctattgacccacaaagtttcagaaattctctgaaagtttcttccttttttctcttactatatttattgatttcaagtcttctattaaggacatttagccttcaatggaaattaaaactcatttaggactgtatttccaaattactgatatcagagttatttaaaaattgtttatttgaggagataacatttcaactttgttcctaaatatataataataaaatgattgactttatttgcaaa

SEQ ID NO: 740 - protein, 453 aa, Homo sapiens
MSWSLHPRNLILYFYALLFLSSTCVAYVATRDNCCILDERFGSYCPTTCGIADFLSTYQTKVDKDLQSLEDILHQVENKTSEVKQLIKAIQLTYNPDESSKPNMIDAATLKSRKMLEEIMKYEASILTHDSSIRYLQEIYNSNNQKIVNLKEKVAQLEAQCQEPCKDTVQIHDITGKDCQDIANKGAKQSGLYFIKPLKANQQFLVYCEIDGSGNGWTVFQKRLDGSVDFKKNWIQYKEGFGHLSPTGTTEFWLGNEKIHLISTQSAIPYALRVELEDWNGRTSTADYAMFKVGPEADKYRLTYAYFAGGDAGDAFDGFDFGDDPSDKFFTSHNGMQFSTWDNDNDKFEGNCAEQDGSGWWMNKCHAGHLNGVYYQGGTYSKASTPNGYDNGIIWATWKTRWYSMKKTTMKIIPFNRLTIGEGQQHHLGGAKQVRPEHPAETEYDSLYPEDDL

SEQ ID NO: 741 - DNA, 2262 bp, Homo sapiens
  CDS (92)..(1660)
gtgaggctgcgcttgcccggggcccgcgcccccctaccccggggaccgcccccgggccgcccgccccacttggcgcgccacttccgcgtgcatggccctgctgccccgagccctgagcgccggcgcgggaccgagctggcggcgggcggcgcgcgccttccgaggcttcctgctgcttctgcccgagcccgcggccctcacgcgcgccctctcccgtgccatggcctgcaggcaggagccgcagccgcagggcccgccgcccgctgctggcgccgtggcctcctatgactacctggtgatcgggggcggctcgggcgggctggccagcgcgcgcagggcggccgagctgggtgccagggccgccgtggtggagagccacaagctgggtggcacttgcgtgaatgttggatgtgtacccaaaaaggtaatgtggaacacagctgtccactctgaattcatgcatgatcatgctgattatggctttccaagttgtgagggtaaattcaattggcgtgttattaaggaaaagcgggatgcctatgtgagccgcctgaatgccatctatcaaaacaatctcaccaagtcccatatagaaatcatccgtggccatgcagccttcacgagtgatcccaagcccacaatagaggtcagtgggaaaaagtacaccgccccacacatcctgatcgccacaggtggtatgccctccacccctcatgagagccagatccccggtgccagcttaggaataaccagcgatggattttttcagctggaagaattgcccggccgcagcgtcattgttggtgcaggttacattgctgtggagatggcagggatcctgtcagccctgggttctaagacatcactgatgatacggcatgataaggtacttagaagttttgattcaatgatcagcaccaactgcacggaggagctggagaacgctggcgtggaggtgctgaagttctcccaggtcaaggaggttaaaaagactttgtcgggcttggaagtcagcatggttactgcagttcccggtaggctaccagtcatgaccatgattccagatgttgactgcctgctctgggccattgggcgggtcccgaataccaaggacctgagtttaaacaaactggggattcaaaccgatgacaagggtcatatcatcgtagacgaattccagaataccaacgtcaaaggcatctatgcagttggggatgtatgtggaaaagctcttcttactccagttgcaatagctgctggccgaaaacttgcccatcgactttttgaatataaggaagattccaaattagattataacaacatcccaactgtggtcttcagccacccccctattgggacagtgggactcacggaagatgaagccattcataaatatggaatagaaaatgtgaagacctattcaacgagctttaccccgatgtatcacgcagttaccaaaaggaaaacaaaatgtgtgatgaaaatggtctgtgctaacaaggaagaaaaggtggttgggatccatatgcagggacttgggtgtgatgaaatgctgcagggttttgctgttgcagtgaagatgggagcaacgaaggcagactttgacaacacagtcgccattcaccctacctcttcagaagagctggtcacacttcgttgagaaccaggagacacgtgtggcgggcagtgggacccatagatcttctgaaatgaaacaaataatcacattgacttactgtttgagttttatgtatttctttattttaatcaggatcttctgatagtggaaatttttagtacataatagaacttatttatggagttagaaatttgtagtgttatccaggattgattttcatttgatcacatctcacagtaattaatattttcaagttttttttttattaacagctctgtgctagttttttttttctgttttagcctcatcccaaatataaagctttgtgaagtacaattaacttaatgtacttgaatgaatagaacttgctactttttttttttttttttttgagacagagttttgctctcattgcccaggctggagtgcggtggtgctatttcagctcaccacaacctctgcctcctgggttcaagtgattctcctgccttagcctcccgaatagctggaattacaggcacgcaccaccatgcctgactaattttgtatttttagtagacatggggtttctccatgttggtcaggctggtctcaaactcccaccttcaggtgatccgcccacc

SEQ ID NO: 742 - protein, 522 aa, Homo sapiens
MALLPRALSAGAGPSWRRAARAFRGFLLLLPEPAALTRALSRAMACRQEPQPQGPPPAAGAVASYDYLVIGGGSGGLASARRAAELGARAAVVESHKLGGTCVNVGCVPKKVMWNTAVHSEFMHDHADYGFPSCEGKFNWRVIKEKRDAYVSRLNAIYQNNLTKSHIEIIRGHAAFTSDPKPTIEVSGKKYTAPHILIATGGMPSTPHESQIPGASLGITSDGFFQLEELPGRSVIVGAGYIAVEMAGILSALGSKTSLMIRHDKVLRSFDSMISTNCTEELENAGVEVLKFSQVKEVKKTLSGLEVSMVTAVPGRLPVMTMIPDVDCLLWAIGRVPNTKDLSLNKLGIQTDDKGHIIVDEFQNTNVKGIYAVGDVCGKALLTPVAIAAGRKLAHRLFEYKEDSKLDYNNIPTVVFSHPPIGTVGLTEDEAIHKYGIENVKTYSTSFTPMYHAVTKRKTKCVMKMVCANKEEKVVGIHMQGLGCDEMLQGFAVAVKMGATKADFDNTVAIHPTSSEELVTLR

SEQ ID NO: 743 - DNA, 1681 bp, Homo sapiens
  CDS (38)..(643)
ggggcgtgaagggagccgggatcagccaggggccagcatgagccggagggagggaagtctggaagacccccagactgattcctcagtctcacttcttccccacttggaggccaagatccgtcagacacacagccttgcgcacctcctcaccaaatacgctgagcagctgctccaggaatatgtgcagctccagggagaccccttcgggctgcccagcttctcgccgccgcggctgccggtggccggcctgagcgccccggctccgagccacgcggggctgccagtgcacgagcggctgcggctggacgcggcggcgctggccgcgctgcccccgctgctggacgcagtgtgtcgccgccaggccgagctgaacccgcgcgcgccgcgcctgctgcgccgcctggaggacgcggcgcgccaggcccgggccctgggcgccgccgtggaggccttgctggccgcgctgggcgccgccaaccgcgggccccgggccgagccccccgccgccaccgcctcagccgcctccgccaccggggtcttccccgccaaggtgctggggctccgcgtttgcggcctctaccgcgagtggctgagccgcaccgagggcgacctgggccagctgctgcccgggggctcggcctgagcgccgcggggcagctcgccccgcctcctcccgctgggttccgtctctccttccgcttctttgtctttctctgccgctgtcggtgtctgtctgtctgctcttagctgtctccattgcctcggccttctttgctttttgtgggggagaggggaggggacgggcagggtctctgtcgcccaggctggggtgcagtggcgcgatcccagcactgcagcctcaacctcctgggctcaagccatccttccgcctcagcttccccagcagctgggactacaggcacgcgccaccacagccggctaattttttatttaattttttgtagagacgaggtttcgccatgttgcccaggctggtcttgaactccggggctcaagcgatcctcccgcttcagcctccctaagtgctgggattgcaggcgtgagccactttcccagcctctctttgctttgcctgccccgttctcttaactcttggaccctcctcgtctgcatggtaactccgtctgagtctaccattttcttgctctccctccttccttgggcctgcctcagttccctttggcctccccctttacccagctcttggggtgtctctgttttttccatccccacttcctgccttctcgtggccctgtgtgagcacatgtgtacatctcagccttatctcaaggaggtgacaccttctctccttgtccccatctggccgtctctctgtgcttccctggccaggggcgtgcctgctggtcctatggggggaaggctactctgcatctcagccaccttcctcaggctcactccacctacatccccagtctgccacaccccatccctttgggcctcagccctgtccctttgatgtcctcctttccttcagcccctctgccctgtccctgcacacctccactgcctcccagcagatctgtggagacaaaacaagcaacaccttaaaagagttttatttctgaaaataaattaattttttgtaaataaaatgtttaaaaataaaaaagaaactaaagttaaaaaaaaaaaaaaaaaa

SEQ ID NO: 744 - protein, 201 aa, Homo sapiens
MSRREGSLEDPQTDSSVSLLPHLEAKIRQTHSLAHLLTKYAEQLLQEYVQLQGDPFGLPSFSPPRLPVAGLSAPAPSHAGLPVHERLRLDAAALAALPPLLDAVCRRQAELNPRAPRLLRRLEDAARQARALGAAVEALLAALGAANRGPRAEPPAATASAASATGVFPAKVLGLRVCGLYREWLSRTEGDLGQLLPGGSA

SEQ ID NO: 745 - DNA, 1916 bp, Homo sapiens
  CDS (225)..(1088)
atggcgccgtgcgtggcctcggcggtggcgcagggggcgggcccgcggcgcggcgccggaggaggaagtggtgaggttgttgctccttcagcgcctatcgctggctcttggggcgcagagaggggccgcagtctccgcggctgcgtcgagctcccttgcagtcccctccatgttccccggcgccactactccccttcctaaggccgccgcttaccccggggtctatggaagtaatggaaggacccctcaacctggctcatcaacagagcagacgagcagaccgtttattagctgcaggcaaatacgaagaggctatttcttgtcacaaaaaggctgcagcatatctttctgaagccatgaagctgacacagtcagagcaggctcatctttcactggaattgcaaagggatagccatatgaaacagctcctcctcatccaagagagatggaaaagggcccagcgtgaagaaagattgaaagcccagcagaacacagacaaggatgcagctgcccatcttcagacatctcacaaaccctctgcagaggatgcagagggccagagtcccctttctcagaagtacagcccttccacagagaaatgcctgcctgagattcaggggatctttgacagggatccagacacactactttatttacttcagcaaaagagtgagccagcagagccatgtattggaagcaaagccccaaaagatgataaaacaattatagaggagcaggcaaccaaaattgcagatttgaagaggcatgtggaattccttgtggctgagaatgaaagattaaggaaagaaaataaacaactaaaggctgaaaaggccagacttctaaaaggtccaatagaaaaggagctggatgtagatgctgattttgtagaaacgtcagagttatggagcttgccaccacatgcagaaactgctacagcctcctcaacctggcagaagttcgcagcaaatactgggaaagccaaggacattccaatccccaatcttcctcccttggattttccatctccagaacttcctcttatggagctctctgaggatattctgaaaggatttatgaataattaaaatggaaggccacagaaaaggggaaaagaggaaataatacagtaatcgttaatccagcaaaaagaaatgaaaagggaaaaccacatagaagggtaatcccggaaatgcttcatctggtggactgtgggagcagaggcattgccaggacttgggaaacagtcactgtgaaatgcgctgcgtatctcattcactcacttcagctaatgattccgacttggcagacgctaaactcatggaggttcggtttctcctgatacaaaccaaatggctacctggaagaatttctttcaagcaacagttatttttcttatcttcagggttaaaatgtataaaagttatgtgtaattaatctataatgccataaatgataatgcaaaacctaaataatatggtggccggaggggctgccttatatttgaaacatgctttctatcatgcattgactgtatgcattttgttaatgcacattctgtttgtttaaggtgtgtaagatacacacccttctagatgaaactatatgtgccacactttgcactactcataatgataacctcaagactatcagaagaaatatttaaatttccattttatgaagaaaggaaccaaattattatgctttttaaaacaaattaccagtttacataattaatcagggtgcattttaagttctaacttcgtttattgtataatgcatcatttgaaaataccaaggaggaaataccctttgtttttaatgatgcaagagtggacgtaatgctagttggcagtattttattgtaagaaatcaataaagtaattgtgttttataaaaaaaaaaaaaaaaaaaaa

SEQ ID NO: 746 - protein, 287 aa, Homo sapiens
MEVMEGPLNLAHQQSRRADRLLAAGKYEEAISCHKKAAAYLSEAMKLTQSEQAHLSLELQRDSHMKQLLLIQERWKRAQREERLKAQQNTDKDAAAHLQTSHKPSAEDAEGQSPLSQKYSPSTEKCLPEIQGIFDRDPDTLLYLLQQKSEPAEPCIGSKAPKDDKTIIEEQATKIADLKRHVEFLVAENERLRKENKQLKAEKARLLKGPIEKELDVDADFVETSELWSLPPHAETATASSTWQKFAANTGKAKDIPIPNLPPLDFPSPELPLMELSEDILKGFMNN

SEQ ID NO: 747 - DNA, 7370 bp, Homo sapiens
  CDS (220)..(696)
ttttgtagataaatgtgaggattttctctaaatccctcttctgtttgctaaatctcactgtcactgctaaattcagagcagatagagcctgcgcaatggaataaagtcctcaaaattgaaatgtgacattgctctcaacatctcccatctctctggatttctttttgcttcattattcctgctaaccaattcattttcagactttgtacttcagaagcaatgggaaaaatcagcagtcttccaacccaattatttaagtgctgcttttgtgatttcttgaaggtgaagatgcacaccatgtcctcctcgcatctcttctacctggcgctgtgcctgctcaccttcaccagctctgccacggctggaccggagacgctctgcggggctgagctggtggatgctcttcagttcgtgtgtggagacaggggcttttatttcaacaagcccacagggtatggctccagcagtcggagggcgcctcagacaggcatcgtggatgagtgctgcttccggagctgtgatctaaggaggctggagatgtattgcgcacccctcaagcctgccaagtcagctcgctctgtccgtgcccagcgccacaccgacatgcccaagacccagaagtatcagcccccatctaccaacaagaacacgaagtctcagagaaggaaaggaagtacatttgaagaacgcaagtagagggagtgcaggaaacaagaactacaggatgtaggaagaccctcctgaggagtgaagagtgacatgccaccgcaggatcctttgctctgcacgagttacctgttaaactttggaacacctaccaaaaaataagtttgataacatttaaaagatgggcgtttcccccaatgaaatacacaagtaaacattccaacattgtctttaggagtgatttgcaccttgcaaaaatggtcctggagttggtagattgctgttgatcttttatcaataatgttctatagaaaagaaaaaaaaaatatatatatatatatatcttagtccctgcctctcaagagccacaaatgcatgggtgttgtatagatccagttgcactaaattcctctctgaatcttggctgctggagccattcattcagcaaccttgtctaagtggtttatgaattgtttccttatttgcacttctttctacacaactcgggctgtttgttttacagtgtctgataatcttgttagtctatacccaccacctcccttcataacctttatatttgccgaatttggcctcctcaaaagcagcagcaagtcgtcaagaagcacaccaattctaacccacaagattccatctgtggcatttgtaccaaatataagttggatgcattttattttagacacaaagctttatttttccacatcatgcttacaaaaaagaataatgcaaatagttgcaactttgaggccaatcatttttaggcatatgttttaaacatagaaagtttcttcaactcaaaagagttccttcaaatgatgagttaatgtgcaacctaattagtaactttcctctttttattttttccatatagagcactatgtaaatttagcatatcaattatacaggatatatcaaacagtatgtaaaactctgttttttagtataatggtgctattttgtagtttgttatatgaaagagtctggccaaaacggtaatacgtgaaagcaaaacaataggggaagcctggagccaaagatgacacaaggggaagggtactgaaaacaccatccatttgggaaagaaggcaaagtccccccagttatgccttccaagaggaacttcagacacaaaagtccactgatgcaaattggactggcgagtccagagaggaaactgtggaatggaaaaagcagaaggctaggaattttagcagtcctggtttctttttctcatggaagaaatgaacatctgccagctgtgtcatggactcaccactgtgtgaccttgggcaagtcacttcacctctctgtgcctcagtttcctcatctgcaaaatgggggcaatatgtcatctacctacctcaaaggggtggtataaggtttaaaaagataaagattcagattttttttaccctgggttgctgtaagggtgcaacatcagggcgcttgagttgctgagatgcaaggaattctataaataacccattcatagcatagctagagattggtgaattgaatgctcctgacatctcagttcttgtcagtgaagctatccaaataactggccaactagttgttaaaagctaacagctcaatctcttaaaacacttttcaaaatatgtgggaagcatttgattttcaatttgattttgaattctgcatttggttttatgaatacaaagataagtgaaaagagagaaaggaaaagaaaaaggagaaaaacaaagagatttctaccagtgaaaggggaattaattactctttgttagcactcactgactcttctatgcagttactacatatctagtaaaacctcgtttaatactataaataatattctattcattttgaaaaacacaatgattccttcttttctaggcaatataaggaaagtgatccaaaatttgaaatattaaaataatatctaataaaaagtcacaaagttatcttctttaacaaactttactcttattcttagctgtatatacatttttttaaaagtttgttaaaatatgcttgactagagtttccagttgaaaggcaaaaacttccatcacaacaagaaatttcccatgcctgctcagaagggtagcccctagctctctgtgaatgtgttttatccattcaactgaaaattggtatcaagaaagtccactggttagtgtactagtccatcatagcctagaaaatgatccctatctgcagatcaagattttctcattagaacaatgaattatccagcattcagatctttctagtcaccttagaactttttggttaaaagtacccaggcttgattatttcatgcaaattctatattttacattcttggaaagtctatatgaaaaacaaaaataacatcttcagtttttctcccactgggtcacctcaaggatcagaggccaggaaaaaaaaaaaaaagactccctggatctctgaatatatgcaaaaagaaggccccatttagtggagccagcaatcctgttcagtcaacaagtattttaactctcagtccaacattatttgaattgagcacctcaagcatgcttagcaatgttctaatcactatggacagatgtaaaagaaactatacatcatttttgccctctgcctgttttccagacatacaggttctgtggaataagatactggactcctcttcccaagatggcacttctttttatttcttgtccccagtgtgtaccttttaaaattattccctctcaacaaaactttataggcagtcttctgcagacttaacgtgttttctgtcatagttagatgtgataattctaagagtgtctatgacttatttccttcacttaattctatccacagtcaaaaatcccccaaggaggaaagctgaaagatgcactgccatattatctttcttaactttttccaacacataatcctctccaactggattataaataaattgaaaataactcattataccaattcactattttattttttaatgaattaaaactagaaaacaaattgatgcaaaccctggaagtcagttgattactatatactacagcagaatgactcagatttcatagaaaggagcaaccaaaatgtcacaacccaaaactttacaagctttgcttcagaattagattgctttataattcttgaatgaggcaatttcaagatatttgtaaaagaacagtaaacattggtaagaatgagctttcaactcataggcttatttccaatttaattgaccatactggatacttaggtcaaatttctgttctctcttccccaaataatattaaagtattatttgaactttttaagatgaggcagttcccctgaaaaagttaatgcagctctccatcagaatccactcttctagggatatgaaaatctcttaacacccaccctacatacacagacacacacacacacacacacacacacacacacacacacattcaccctaaggatccaatggaatactgaaaagaaatcacttccttgaaaattttattaaaaaacaaacaaacaaacaaaaagcctgtccacccttgagaatccttcctctccttggaacgtcaatgtttgtgtagatgaaaccatctcatgctctgtggctccagggtttctgttactattttatgcacttgggagaaggcttagaataaaagatgtagcacattttgctttcccatttattgtttggccagctatgccaatgtggtgctattgtttctttaagaaagtacttgactaaaaaaaaaagaaaaaaagaaaaaaaagaaagcatagacatatttttttaaagtataaaaacaacaattctatagatagatggcttaataaaatagcattaggtctatctagccaccaccacctttcaactttttatcactcacaagtagtgtactgttcaccaaattgtgaatttgggggtgcaggggcaggagttggaaattttttaaagttagaaggctccattgttttgttggctctcaaacttagcaaaattagcaatatattatccaatcttctgaacttgatcaagagcatggagaataaacgcgggaaaaaagatcttataggcaaatagaagaatttaaaagataagtaagttccttattgatttttgtgcactctgctctaaaacagatattcagcaagtggagaaaataagaacaaagagaaaaaatacatagatttacctgcaaaaaatagcttctgccaaatcccccttgggtattctttggcatttactggtttatagaagacattctcccttcacccagacatctcaaagagcagtagctctcatgaaaagcaatcactgatctcatttgggaaatgttggaaagtatttccttatgagatgggggttatctactgataaagaaagaatttatgagaaattgttgaaagagatggctaacaatctgtgaagattttttgtttcttgtttttgttttttttttttttttactttatacagtctttatgaatttcttaatgttcaaaatgacttggttcttttcttctttttttatatcagaatgaggaataataagttaaacccacatagactctttaaaactataggctagatagaaatgtatgtttgacttgttgaagctataatcagactatttaaaatgttttgctatttttaatcttaaaagattgtgctaatttattagagcagaacctgtttggctctcctcagaagaaagaatctttccattcaaatcacatggctttccaccaatattttcaaaagataaatctgatttatgcaatggcatcatttattttaaaacagaagaattgtgaaagtttatgcccctcccttgcaaagaccataaagtccagatctggtaggggggcaacaacaaaaggaaaatgttgttgattcttggttttggattttgttttgttttcaatgctagtgtttaatcctgtagtacatatttgcttattgctattttaatattttataagaccttcctgttaggtattagaaagtgatacatagatatcttttttgtgtaatttctatttaaaaaagagagaagactgtcagaagctttaagtgcatatggtacaggataaagatatcaatttaaataaccaattcctatctggaacaatgcttttgttttttaaagaaacctctcacagataagacagaggcccaggggatttttgaagctgtctttattctgcccccatcccaacccagcccttattattttagtatctgcctcagaattttatagagggctgaccaagctgaaactctagaattaaaggaacctcactgaaaacatatatttcacgtgttccctctttttttttttcctttttgtgagatggggtctcgcactgtcccccaggctggagtgcagtggcatgatctcggctcactgcaacctccacctcctgggtttaagcgattctcctgcctcagcctcctgagtagctgggattacaggcacccaccactatgcccggctaattttttggatttttaatagagacggggttttaccatgttggccaggttggtctcaaactcctgaccttgtgatttgcccgcctcagcctcccaaattgctgggattacaggcatgagccaccacaccctgcccatgtgttccctcttaatgtatgattacatggatcttaaacatgatccttctctcctcattcttcaactatctttgatggggtctttcaaggggaaaaaaatccaagcttttttaaagtaaaaaaaaaaaaagagaggacacaaaaccaaatgttactgctcaactgaaatatgagttaagatggagacagagtttctcctaataaccggagctgaattacctttcactttcaaaaacatgaccttccacaatccttagaatctgcctttttttatattactgaggcctaaaagtaaacattactcattttattttgcccaaaatgcactgatgtaaagtaggaaaaataaaaacagagctctaaaatccctttcaagccacccattgaccccactcaccaactcatagcaaagtcacttctgttaatcccttaatctgattttgtttggatatttatcttgtacccgctgctaaacacactgcaggagggactctgaaacctcaagctgtctacttacatcttttatctgtgtctgtgtatcatgaaaatgtctattcaaaatatcaaaacctttcaaatatcacgcagcttatattcagtttacataaaggccccaaataccatgtcagatctttttggtaaaagagttaatgaactatgagaattgggattacatcatgtattttgcctcatgtatttttatcacacttataggccaagtgtgataaataaacttacagacactgaattaatttcccctgctactttgaaaccagaaaataatgactggccattcgttacatctgtcttagttgaaaagcatattttttattaaattaattctgattgtatttgaaattattattcaattcacttatggcagaggaatatcaatcctaatgacttctaaaaatgtaactaattgaatcattatcttacatttactgtttaataagcatattttgaaaatgtatggctagagtgtcataataaaatggtatatctttctttagtaattacattaaaattagtcatgtttgattaattagttc

SEQ ID NO: 748 - protein, 158 aa, Homo sapiens
MGKISSLPTQLFKCCFCDFLKVKMHTMSSSHLFYLALCLLTFTSSATAGPETLCGAELVDALQFVCGDRGFYFNKPTGYGSSSRRAPQTGIVDECCFRSCDLRRLEMYCAPLKPAKSARSVRAQRHTDMPKTQKYQPPSTNKNTKSQRRKGSTFEERK

SEQ ID NO: 749 - DNA, 2628 bp, Homo sapiens
  CDS (114)..(1904)
gtgcgctgccgtaccggtcacgtggacgtttggtcacgtgactgcgtccgtggtcctcccgtaggaaccggcggactcggttggcgttgtggggcagggggtggtggagcaagatggcggctcatctgtcctacggccgagtgaacctaaacgtgttgcgcgaggcggtgcgtcgcgagctgcgcgagttcctggacaagtgcgcaggaagcaaggcaatagtttgggatgaatacctaactggaccctttggcctgattgcacagtattcactattgaaggaacatgaagtggaaaaaatgttcacacttaaaggaaatcgtttgccggcagctgatgtgaagaatataattttttttgtcagacccaggctagagttgatggatataatcgctgaaaacgtgctcagtgaagatagacgaggcccaacgagagattttcatattctgtttgtgccacgccgtagcctgttgtgcgaacagcggttgaaggatctgggtgtcttgggatcctttattcacagggaggagtacagcttagatctcattccattcgatggggatctcttatccatggaatcagagggtgcattcaaagagtgctacctggagggtgaccagacgagcctgtaccacgcagccaaggggctgatgaccctgcaagctctgtatggaacgatcccccagatctttgggaaaggagaatgcgctcggcaagtggccaatatgatgatcaggatgaagagagagtttacaggaagccagaattcaatatttcctgtttttgataatctcttgttgcttgatcggaatgtggatttattaacacctcttgccactcagctgacatatgaaggactcattgatgaaatttatggcattcagaacagttatgtgaaattacctccagagaaatttgcacctaagaaacagggcgatggtggtaaggacctccccacggaagcaaagaagctgcagctgaattctgcagaggagctctatgctgagatccgagataagaacttcaacgcagttggctctgtgctcagcaagaaagcaaagatcatctctgcagcattcgaggaaagacacaatgctaagaccgtgggggagatcaagcagtttgtttcccagttgccccacatgcaggcagcaaggggctcgcttgcaaaccatacctcaattgcagaattgatcaaagatgtcactacttctgaagacttttttgataaattaaccgtggaacaggagtttatgtctggaatagacactgataaggtcaacaattacattgaggattgtatcgcccaaaagcactcgttgatcaaggtgttaagactagtttgcctccaatccgtgtgtaatagtgggctcaaacaaaaagttttggattattacaaaagagagattctccagacatacggctatgagcacatattgaccttacacaacctggagaaggccggcctgctgaaaccgcagacggggggcagaaacaattacccaactatacggaaaacattacgcctctggatggatgatgttaatgagcaaaaccccacggacatatcgtatgtgtacagtgggtatgccccgctcagtgtgcggctggcccagctgctttcccggcctggctggcggagcatcgaggaggtcctccgcatcctcccagggccccactttgaggagcggcagccactgcccacaggactgcagaagaaacgtcaaccgggagaaaaccgagtgactctgatatttttccttgggggcgtaaccttcgctgaaattgctgccctgcgatttctctcccagttggaagatggaggtacagaatatgtcattgccaccactaaactaatgaatggaaccagttggatagaggctctgatggaaaaacctttctaggatgttcagaggagacttaacaagtgtactgcagaataaactacctctttgaagaaattgctgaaaggaagtaaaaccccatagaagaaacatgggaatacagaatatattctggggtcagcttcttaaattatactactgtttactgctttctccgtctcttttgtattccctttttttttttcctttgagacggagtcttgctctgtcacccagactagagtgcagtggcacggtctcacctcactgcaacctccacctcctaggttcaagcaattctcctgcctcagcctcctgagtagctgggactacaggcatgcaccaccacacccggctaatttttgtatttttagtagccatggtgtttcaccatgttggccaggctggtctcaaactcctgacctcaggtgatccacctgcctcggcctcccacagtgctgggattacaggcctgagccaccgtgcctggcccctaatctgctgaagaaagaagaatagaagaaaatcaacctgagtaaaagcagcactggttttgagttttctaagctcagggtcttcattagagacctctggaaatacattaaggatggtgggggtagataatccattcagccagacaaacggggccagctcttaaaataagaaagctgagactgaggaggtgaaactgaaaataaaaagagaaagttcatcctctaaaaaaaaaaaaaaaaaaaaaaaaaaa

SEQ ID NO: 750 - protein, 596 aa, Homo sapiens
MAAHLSYGRVNLNVLREAVRRELREFLDKCAGSKAIVWDEYLTGPFGLIAQYSLLKEHEVEKMFTLKGNRLPAADVKNIIFFVRPRLELMDIIAENVLSEDRRGPTRDFHILFVPRRSLLCEQRLKDLGVLGSFIHREEYSLDLIPFDGDLLSMESEGAFKECYLEGDQTSLYHAAKGLMTLQALYGTIPQIFGKGECARQVANMMIRMKREFTGSQNSIFPVFDNLLLLDRNVDLLTPLATQLTYEGLIDEIYGIQNSYVKLPPEKFAPKKQGDGGKDLPTEAKKLQLNSAEELYAEIRDKNFNAVGSVLSKKAKIISAAFEERHNAKTVGEIKQFVSQLPHMQAARGSLANHTSIAELIKDVTTSEDFFDKLTVEQEFMSGIDTDKVNNYIEDCIAQKHSLIKVLRLVCLQSVCNSGLKQKVLDYYKREILQTYGYEHILTLHNLEKAGLLKPQTGGRNNYPTIRKTLRLWMDDVNEQNPTDISYVYSGYAPLSVRLAQLLSRPGWRSIEEVLRILPGPHFEERQPLPTGLQKKRQPGENRVTLIFFLGGVTFAEIAALRFLSQLEDGGTEYVIATTKLMNGTSWIEALMEKPF

SEQ ID NO: 751 - DNA, 4360 bp, Homo sapiens
  CDS (332)..(1288)
gcggccgcggcagggctgggcctgcgactacccgaggaggctgacctccagcccgggcgcccggttcagcgccgccccggccggcgccggtgcctgccaggcactcagggaggcgggggcgcagtggaggaggcggcgccatcgcgaagcgagcgcctcgcccgcactcagccttgccaccccgcccgcagtccaggctggactgggcggcatttgccgaggctcctcggccaggccccgtccgcccgagccgcgctgagacccgggcagcggccgcgtggagaggaggtggcagcggcccgggaggccggagccaagccagcgacccaccatggagacccgctacaacctgaagagtccggctgttaaacgtttaatgaaagaagcggcagaattgaaagatccaacagatcattaccatgcgcagcctttagaggataacctttttgaatggcacttcacggttagagggcccccagactccgattttgatggaggagtttatcacgggcggatagtactgccaccagagtatcccatgaaaccaccaagcattattctcctaacggctaatggtcgatttgaagtgggcaagaaaatctgtttgagcatctcaggccatcatcctgaaacttggcagccttcgtggagtataaggacagcattattagccatcattgggtttatgccaacaaaaggagagggagccataggttctctagattacactcctgaggaaagaagagcacttgccaaaaaatcacaagatttctgttgtgaaggatgtggctctgccatgaaggatgtcctgttgcctttaaaatctggaagcgattcaagccaagctgaccaagaagccaaagaactggctaggcaaataagctttaaggcagaagtcaattcatctggaaagactatctctgagtcagacttaaaccactctttttcactaactgatttacaagatgatatacctacaacattccagggtgctacggccagtacatcgtacggactccagaattcctcagcagcatcctttcatcaacctacccaacctgtagctaagaatacctccatgagccctcgacagcgccgggcccagcagcagagtcagagaaggttgtctacttcaccagatgtaatccagggccaccagccaagagacaaccacactgatcatggtgggtcagctgtactgattgtcatcctgactttggcattggcagctcttatattccgacgaatatatctggcaaacgaatacatatttgactttgagttataatatggttttgtgacttatgagctgtgactcaactgcttcattaaacattctgcattgggtataatctaagaattgtttacaaaaagattattttgtatttacccttcattcctttttttgatccttgtaagtttagtataaatatatctagacattcagactgtgtctagcagttacgtcctgcttaaagggactagaagtcaaagttccttgtctcactatttgatctgctttgcagggaaataacttgttttttctcatgtttcatcttctttttatgtaaatttgtaatactttcctatattgccctttgaaatttttggataaaagatgatgttttaagttccaatgagtattactagttactcaataccacttattgagtactctgtttctacgtatgtagaatgtatagggatagaagagttgaaaagggaaagcaaaactcctcaagtagcttccttaaaatgtcattcataggagatgtactggaattgctcattctgtgactttatttgtgtcctaaacattcttcagtgaaaataattttatttcagtcaaacatttatgaggaaatgagatcacatctttgtcactggatgctacttgaagagggagtactttgtaaccactttgatatgctgttatcaccaccccctgccctctgctgccataatcacacaaatttaaaaagaaagaaaacagtcttccatagatttttaaggaagaaagggcccaagccaggagatcgcttggttttcttccagaagttaaatggggggatctgaagatttgaatgtttggtctgctttgaaatgtatgtcttttgggatgtattatatgcctagctttataatcagtataaattttaattattccaggaatatgcataatattgaaatatttcatgtcctattttaatagaaaacctcagggcccaagtaacagtgatagaagttagaaaaacctttacttagaattgtccacctagtcagagcccaagaaagaattttcagtggaaaaatcaatatataacttagtgctagctagcgccacagactctagtagataatattatcatcataatggctggtgaaaccatataatcacagaaaaacattgccttcagcatgttcagttcgcagcactgagggcactcttgagggtgttgttaatgaagatttaatttttaaatacaggtggttccaagctttcaaataggttatgctccaaaagtgttatttgtaagttaatttttttacaagtcaaacaatgttggaagtggtatttaggttctagatcggtccacgaaagttagcccatatgtatatcttgaatagtataggggagggtattcataaagtccttatgtggttttaactaagtgaaattatggacaagagaaataattgtaaaatcgtcttaaaggaaaatttaatttttactcctgtttatgggacattcgttctattaactgtcagacacaatttctgttttcatctgagagccagttttcctttatttctacatctaaaataagaacatattgtacactattatataatacagaattgtcttaaactttaataaattcgcattttaaaggtgtttacagattattttttatatctgtagctgaatttgttaaagtctaaaaagctcaaggactttatgaagatctcattatatgaggaaaatcataggttaccattttataactctattgccataagaaaatacactctaaaatcttgatttgaaacatattagaaaccttgattcagtgctcagtggtctcctagtaagaagtcaccgacggtagcgtcatatgagaagaaagaaatccccaccacctcaacctctgctgagattgtgtgctaggaacagccttccctccgtttcccctcagtcaaacttgagccagcctctggatcgatgtgatcttattgcatgtttccatggggtgtacctatactttaagccaatcctgctgcattcactgctaagttaaataaaaagccaagaagattttgcactgtgcagatcctttgctatctgacttgcatctcttcccccacctgtcagctagccacctgcttgtttgtgttgggatattttttagcacctgaagcaccatctgaaaggggcaccattttcttcttccctttgatctcacatatgctccctaaaaatccttaagttgtcaatctgatccccagtgtgaggttaatgagcaaaattggtctttggggccctttttgtccaagccccactgaaaggcctcttcagaaaactattatctttaaagccctactttaactccttaattccagcatacagctaaaactggatgtatattctggcaagtaaaggctgaggactcctctttaatcctcagatctagataactcatgacattttatttgaccaacatagcacatgatgagatatcaaggtaattaaaatagcatgcttgaaaaaaaaatacgtaatctgtttcacctgtaactgtttaagccaataaacttttcaaaatttatgtaatgtggggcttttatgtagcactttacgttttcatgctgcttattgttttattctactgaaaaaaatgaatttcaagattctcaacttttttaatttcaaaaattgtttattgttttgactataggaatacaaaatttcctattttgggagaataagaactctttttgtcatttttggctatgaataaactttctggtcttttgagaccacccatttttatagatcagaatcagaaaacaggtaaacctcactcacacatttggactcatttgaacaaaaatctaggccaaaatactgaaaagcctatgtgtttttttaattggaagtatatgtaaggttaatgcatttagtgaacgtgactaacaaagactaatgtgcacattaacagatgtactttttaaggttttatgggaggctgtgcattgctcaaaagctgttgggaacgccttctgaacagttgccttcagaactagtttgagctgctcaataaaaccagtgactttactcataaaaaaaaaaaaaaaaaaa

SEQ ID NO: 752 - protein, 318 aa, Homo sapiens
METRYNLKSPAVKRLMKEAAELKDPTDHYHAQPLEDNLFEWHFTVRGPPDSDFDGGVYHGRIVLPPEYPMKPPSIILLTANGRFEVGKKICLSISGHHPETWQPSWSIRTALLAIIGFMPTKGEGAIGSLDYTPEERRALAKKSQDFCCEGCGSAMKDVLLPLKSGSDSSQADQEAKELARQISFKAEVNSSGKTISESDLNHSFSLTDLQDDIPTTFQGATASTSYGLQNSSAASFHQPTQPVAKNTSMSPRQRRAQQQSQRRLSTSPDVIQGHQPRDNHTDHGGSAVLIVILTLALAALIFRRIYLANEYIFDFEL

SEQ ID NO: 753 - DNA, 2634 bp, Homo sapiens
  CDS (142)..(789)
acaggcacaggtgaggaactcaactcaaactcctctctctgggaaaacgcggtgcttgctcctcccggagtggccttggcagggtgttggagccctcggtctgccccgtccggtctctggggccaaggctgggtttccctcatgtatggcaagagctctactcgtgcggtgcttcttctccttggcatacagctcacagctctttggcctatagcagctgtggaaatttatacctcccgggtgctggaggctgttaatgggacagatgctcggttaaaatgcactttctccagctttgcccctgtgggtgatgctctaacagtgacctggaattttcgtcctctagacgggggacctgagcagtttgtattctactaccacatagatcccttccaacccatgagtgggcggtttaaggaccgggtgtcttgggatgggaatcctgagcggtacgatgcctccatccttctctggaaactgcagttcgacgacaatgggacatacacctgccaggtgaagaacccacctgatgttgatggggtgataggggagatccggctcagcgtcgtgcacactgtacgcttctctgagatccacttcctggctctggccattggctctgcctgtgcactgatgatcataatagtaattgtagtggtcctcttccagcattaccggaaaaagcgatgggccgaaagagctcataaagtggtggagataaaatcaaaagaagaggaaaggctcaaccaagagaaaaaggtctctgtttatttagaagacacagactaacaattttagatggaagctgagatgatttccaagaacaagaaccctagtatttcttgaagttaatggaaacttttctttggcttttccagttgtgacccgttttccaaccagttctgcagcatattagattctagacaagcaacacccctctggagccagcacagtgctcctccatatcaccagtcatacacagcctcattattaaggtcttatttaatttcagagtgtaaattttttcaagtgctcattaggttttataaacaagaagctacatttttgcccttaagacactacttacagtgttatgacttgtatacacatatattggtatcaaaagggataaaagccaatttgtctgttacatttcctttcacgtatttcttttagcagcacttctgctactaaagttaatgtgtttactctctttccttcccacattctcaattaaaaggtgagctaagcctcctcggtgtttctgattaacagtaaatcctaaattcaaactgttaaatgacatttttatttttatgtctctccttaactatgagacacatcttgttttactgaatttctttcaatattccaggtgatagatttttgttgttttgttaattaatccaagatttacaatagcacaacgctaaatcacacagtaactacaaaaggttacatagatatgaaaagattggcagaggccattgcaggatgaatcacttgtcacttttcttctgtgctgggaaaaataatcaacaatgtgggtctttcatgagcagtgacggatagtttagcttactatgtttcccccccaattcaatgatctataacaacagagcaaagtctatgctcatttgcagactggaatcattaagtaatttaataaaaaaattgtgaaacagcatattacaagtttgaaaattcagggctggtgaaaaaaatcaactctaaatgatgataattttgtacagttttatataaaactctgagaactagaagaaattattaactttttttcttttttaattctaattcacttgtttattttgggggaggaagactttggtatggagcaaagaaataccaaaactactttaaatggaataaaaccaactttattctttttttcccccatactggtagataaagcaaactttataagtgggctattgaaagaaaagttacaagcttaagatacagaagcatttgttcaaaggatagaaagcatctaaaagtttaggctcaagatcaatctttacagattgatattttcagtttttaatcgactggactgcagatgttttttcttttaacaaactggaattttcaaacagattatctgtatttaaatgtatagaccttgatatttttccaatactattttttaaaaaattgtatgatttacatatgaacctcagttctgaaattcattacatatctgtctcattctgccttttatactgtctaaaaaagcaaagttttaaagtgcaattttaaaactgtaaattacatctgaaggctatatatcctttaatcacattttatattttttcttcacaattctaacctttgaaaatattataactggatatttcttcaaacagatgtcctggatgatggtccataagaataatgaagaagtagttaaaaatgtatggacagtttttccggcaaaatttgtagcttatgtcttggctaaatagtcaaggggtaatatgggcctgttgtttagtgtctccttcctaaagagcacttttgtattgtaatttattttttattatgctttaaacactatgtaaataaacctttagtaataaagaattatcagttataaaaaaaaaaaaaaaaaaa

SEQ ID NO: 754 - protein, 215 aa, Homo sapiens
MYGKSSTRAVLLLLGIQLTALWPIAAVEIYTSRVLEAVNGTDARLKCTFSSFAPVGDALTVTWNFRPLDGGPEQFVFYYHIDPFQPMSGRFKDRVSWDGNPERYDASILLWKLQFDDNGTYTCQVKNPPDVDGVIGEIRLSVVHTVRFSEIHFLALAIGSACALMIIIVIVVVLFQHYRKKRWAERAHKVVEIKSKEEERLNQEKKVSVYLEDTD

SEQ ID NO: 755 - DNA, 684 bp, Homo sapiens
  CDS (139)..(435)
cattcccagcctcacatcactcacaccttgcatttcacccctgcatcccagtcgccctgcagcctcacacagatcctgcacacacccagacagctggcgctcacacattcaccgttggcctgcctctgttcaccctccatggccctgctactggccctcagcctgctggttctctggacttccccagccccaactctgagtggcaccaatgatgctgaagactgctgcctgtctgtgacccagaaacccatccctgggtacatcgtgaggaacttccactaccttctcatcaaggatggctgcagggtgcctgctgtagtgttcaccacactgaggggccgccagctctgtgcacccccagaccagccctgggtagaacgcatcatccagagactgcagaggacctcagccaagatgaagcgccgcagcagttaacctatgaccgtgcagagggagcccggagtccgagtcaagcattgtgaattattacctaacctggggaaccgaggaccagaaggaaggaccaggcttccagctcctctgcaccagacctgaccagccaggacagggcctggggtgtgtgtgagtgtgagtgtgagcgagagggtgagtgtggtcagagtaaagctgctccacccccagattgcaatgctaccaataaagccgcctggtgtttacaactaa

SEQ ID NO: 756 - protein, 98 aa, Homo sapiens
MALLLALSLLVLWTSPAPTLSGTNDAEDCCLSVTQKPIPGYIVRNFHYLLIKDGCRVPAVVFTTLRGRQLCAPPDQPWVERIIQRLQRTSAKMKRRSS

SEQ ID NO: 757 - DNA, 2518 bp, Homo sapiens
  CDS (39)..(2225)
gtgagaggtcagcagaggggcggtctgcggggacaacaatggcggggttctgggtcgggacagcaccgctggtcgctgccggacggcgtgggcggtggccgccgcagcagctgatgctgagcgcggcgctgcggaccctgaagcatgttctgtactattcaagacagtgcttaatggtgtcccgtaatcttggttcagtgggatatgatcctaatgaaaaaacttttgataaaattcttgttgctaatagaggagaaattgcatgtcgggttattagaacttgcaagaagatgggcattaagacagttgccatccacagtgatgttgatgctagttctgttcatgtgaaaatggcggatgaggctgtctgtgttggcccagctcccaccagtaaaagctacctcaacatggatgccatcatggaagccattaagaaaaccagggcccaagctgtacatccaggttatggattcctttcagaaaacaaagaatttgccagatgtttggcagcagaagatgtcgttttcattggacctgacacacatgctattcaagccatgggcgacaagattgaaagcaaattattagctaagaaagcagaggttaatacaatccctggctttgatggagtagtcaaggatgcagaagaagctgtcagaattgcaagggaaattggctaccctgtcatgatcaaggcctcagcaggtggtggtgggaaaggcatgcgcattgcttgggatgatgaagagaccagggatggttttagattgtcatctcaagaagctgcttctagttttggcgatgatagactactaatagaaaaatttattgataatcctcgtcatatagaaatccaggttctaggtgataaacatgggaatgctttatggcttaatgaaagagagtgctcaattcagagaagaaatcagaaggtggtggaggaagcaccaagcatttttttggatgcggagactcgaagagcgatgggagaacaagctgtagctcttgccagagcagtaaaatattcctctgctgggaccgtggagttccttgtggactctaagaagaatttttatttcttggaaatgaatacaagactccaggttgagcatcctgtcacagaatgcattactggcctggacctagtccaggaaatgatccgtgttgctaagggctaccctctcaggcacaaacaagctgatattcgcatcaacggctgggcagttgaatgtcgggtttatgctgaggacccctacaagtcttttggtttaccatctattgggagattgtctcagtaccaagaaccgttacatctacctggtgtccgagtggacagtggcatccaaccaggaagtgatattagcatttattatgatcctatgatttcaaaactaatcacatatggctctgatagaactgaggcactgaagagaatggcagatgcactggataactatgttattcgaggtgttacacataatattgcattacttcgagaggtgataatcaactcacgctttgtaaaaggagacatcagcactaaatttctctccgatgtgtatcctgatggcttcaaaggacacatgctaaccaagagtgagaagaaccagttattggcaatagcatcatcattgtttgtggcattccagttaagagcacaacattttcaagaaaattcaagaatgcctgttattaaaccagacatagccaactgggagctctcagtaaaattgcatgataaagttcataccgtagtagcatcaaacaatgggtcagtgttctcggtggaagttgatgggtcgaaactaaatgtgaccagcacgtggaacctggcttcgcccttattgtctgtcagcgttgatggcactcagaggactgtccagtgtctttctcgagaagcaggtggaaacatgagcattcagtttcttggtacagtgtacaaggtgaatatcttaaccagacttgccgcagaattgaacaaatttatgctggaaaaagtgactgaggacacaagcagtgttctgcgttccccgatgcccggagtggtggtggccgtctctgtcaagcctggagacgcggtagcagaaggtcaagaaatttgtgtgattgaagccatgaaaatgcagaatagtatgacagctgggaaaactggcacggtgaaatctgtgcactgtcaagctggagacacagttggagaaggggatctgctcgtggagctggaatgaaggatttataacctttcagtcatcacccaatttaattagccatttgcatgatgctttcacacacaattgattcaagcattatacaggaacacccctgtgcagctacgtttacgtcgtcatttattccacagagtcaagaccaatattctgccaaaaaatcaccaatggaaattttcattgatataaatacttgtacatatgatttgtacttctgctgtgagattccctagtgtcaaaattaaatcaataaaactgagcatttgtctaaaaaaaaaaaaaaaaaaaaaaaaaaa

SEQ ID NO: 758 - protein, 728 aa, Homo sapiens
MAGFWVGTAPLVAAGRRGRWPPQQLMLSAALRTLKHVLYYSRQCLMVSRNLGSVGYDPNEKTFDKILVANRGEIACRVIRTCKKMGIKTVAIHSDVDASSVHVKMADEAVCVGPAPTSKSYLNMDAIMEAIKKTRAQAVHPGYGFLSENKEFARCLAAEDVVFIGPDTHAIQAMGDKIESKLLAKKAEVNTIPGFDGVVKDAEEAVRIAREIGYPVMIKASAGGGGKGMRIAWDDEETRDGFRLSSQEAASSFGDDRLLIEKFIDNPRHIEIQVLGDKHGNALWLNERECSIQRRNQKVVEEAPSIFLDAETRRAMGEQAVALARAVKYSSAGTVEFLVDSKKNFYFLEMNTRLQVEHPVTECITGLDLVQEMIRVAKGYPLRHKQADIRINGWAVECRVYAEDPYKSFGLPSIGRLSQYQEPLHLPGVRVDSGIQPGSDISIYYDPMISKLITYGSDRTEALKRMADALDNYVIRGVTHNIALLREVIINSRFVKGDISTKFLSDVYPDGFKGHMLTKSEKNQLLAIASSLFVAFQLRAQHFQENSRMPVIKPDIANWELSVKLHDKVHTVVASNNGSVFSVEVDGSKLNVTSTWNLASPLLSVSVDGTQRTVQCLSREAGGNMSIQFLGTVYKVNILTRLAAELNKFMLEKVTEDTSSVLRSPMPGVVVAVSVKPGDAVAEGQEICVIEAMKMQNSMTAGKTGTVKSVHCQAGDTVGEGDLLVELE

SEQ ID NO: 759 - DNA, 996 bp, Homo sapiens
  CDS (1)..(996)
atgagtggggagaatgtcaccagggtcggcaccttcatcctggtgggcttccccacggccccagggctgcagtacctgctcttcctcctcttcctgctcacctacctctttgtcctggtggagaacctggccatcatcctcaccgtctggagcagcacctccctccacaggcccatgtactactttctgagctccatgtctttcctagagatctggtacgtgtctgacatcacccccaagatgctggagggcttcctcctccagcagaaacgcatctctttcgtcgggtgcatgacgcagctctacttcttcagctccctggtgtgcaccgagtgtgtgcttctggcctccatggcctacgaccgctacgtggccatctgccacccgctgcgctaccacgtccttgtgaccccggggctgtgcctccagctggtgggcttctcctttgtgagtggcttcaccatctccatgatcaaggtctgttttatctccagcgtcacgttctgtggctccaacgtcttgaaccacttcttctgtgacatttcccccatcctcaagctggcctgcacggacttctccactgcagagctggtggatttcattctggccttcatcatcctggtgtttccactcctggccaccatgctgtcatatgcgcacatcaccctggctgtcctgcgcatcccctcggccaccggctgctggagagccttcttcacctgcgcctctcacctcaccgtggtcaccgtcttctatacagccttgcttttcatgtatgtccggccccaggccattgattcccggagctccaacaagctcatctctgttttgtacacagttatcacccccatcttgaaccccttgatatactgcctgaggaataaggaatttaagaatgccttgaaaaaagccttcggcttgacgagctgcgccgtagaggggaggctttctagtcttctggaacttcatctccaaatacacagccagcctctctga

SEQ ID NO: 760 - protein, 331 aa, Homo sapiens
MSGENVTRVGTFILVGFPTAPGLQYLLFLLFLLTYLFVLVENLAIILTVWSSTSLHRPMYYFLSSMSFLEIWYVSDITPKMLEGFLLQQKRISFVGCMTQLYFFSSLVCTECVLLASMAYDRYVAICHPLRYHVLVTPGLCLQLVGFSFVSGFTISMIKVCFISSVTFCGSNVLNHFFCDISPILKLACTDFSTAELVDFILAFIILVFPLLATMLSYAHITLAVLRIPSATGCWRAFFTCASHLTVVTVFYTALLFMYVRPQAIDSRSSNKLISVLYTVITPILNPLIYCLRNKEFKNALKKAFGLTSCAVEGRLSSLLELHLQIHSQPL

SEQ ID NO: 761 - DNA, 961 bp, Homo sapiens
  CDS (347)..(634)
gaggacaagcagcctgcccagaagtggaagaaactgaaagtggagtcctgagagctgaatctgccgcaggcccgcgggccgcccgggaattaggaaagttagaggggatccacgcccacaagtgctatggactctgatcgcccaaccagagcaaacccagaaggacaactctccaagcctttcaatcactcccactaacccgtattgtggacacactattgtgaggcctactaaggatgtactgctgatgaccttttgaagagtggctagtggttggcccatgtaggctgagctcagctggtccatccttcttggacccacagactccctggggcatgttcttctcatgatgatgactgcaacacagagggcaagacatcctacacaagcacatttcaagattttgctcgcatcatctctgctaaaattcctttatccaaagcaaggaacacaactggttcaaataagcacaggcctccaaatatccagatctaaaaatggagtgttcacctcagctccttatttatcactgcaagagattctggggctggcagctagtgacatgagctggaatcctcttcctgaaattgctgtcttcttggatgggctctccacatcttccaccacgaagtaaaaacaattcttgtgggtgccagtggacctgctctgcagacccaggctcctctcccatggagcatcccaagtctgtccttatgggaagaagcaggagccctgtctggctgtaccccaagctgctttctctggaccaatgctgtcagcgatagagggaacccttccaccatcatgtgaagaagcctggtctagcctgctggaggatgagagatcacatggaatgaggccacaatcgttccagccaaagccccagtaatagaattaagatcatccaagaccatggcatcccgcctgagaagttcagatgagaagggccacctgaacaacc

SEQ ID NO: 762 - protein, 95 aa, Homo sapiens
MMMTATQRARHPTQAHFKILLASSLLKFLYPKQGTQLVQISTGLQISRSKNGVFTSAPYLSLQEILGLAASDMSWNPLPEIAVFLDGLSTSSTTK

SEQ ID NO: 763 - DNA, 6540 bp, Homo sapiens
  CDS (143)..(4237)
gcggcagcccgggactccggcgagagcgacgcaaggtcggctgcggcggcggcccgagggcgcccgtgtgcccagtgcgcggcggggacggccgcgagctcgctggagggctccccagaataatccagaagtcgattccatcatggcagaactcaaggtggaggcgccggccagcgtagactggcagaaacgctgcctgaccctggaaactcagcttttccggttccgcctacaggccagcaagataagggagctgctggctgacaagatgcaggagctggagcagaggctgctggaggcagagcagagagcagagaacgctgagacccaggtgggtgtcatggaagagaaggtaaaactatccaatctgaagaatgtggactctgaggggagcctgcaccggaaataccaagaattgctgaaagccataaagggcaaagatgagctcatcagccagctagaggctcagctggagaagcagaagcagatgagggcagaggaagcaaaaactgttcaagaaaaagctgcaaagatcaaggaatgggtgacactcaagttggcaaagcttgagatggagaatcagcatctgaaaagccataatcagcgcctggtggagcaggtgggatcccttcaagatgcgctagaagctattcagatagctccttcacggaagctgctggtgcccccctacggagctgcagagcaggattctgtcccttcagagccgggaatccagcctatgggccaggacagtggctcccaggcccagggtctgaaggcagctgtgcttgcaccttccccaggtgccctgcagagcaaggactctgtttctgaagcagcaagccccttggaggattctagttccagcacggtccattctggggaaacagtagaggccaagccccttcaacctcatctgggaagagagagccctccccaccagccatgcatgaagcttcttaccttcagatgtagttcagcttcctggggtgagggtctggttactgctcagagagggatgctccctgggacaaagacctctgccagggaaggtggtcctggcagcagtctgaccctaccaaaggtgcgggctcctggcaccccgcgggacagcatccagttggccaaaaggcaccacagccagccccaggtgggccatgggcactttggccgtgtggtgaacattgagactgaggccttctcagccctccacccctctggccttcctgagctggagtcccgagctaggtcccgggaggaaccagagaagatggagatggaggagccacccccagcagggaagaatgaggaaagagagagcccaaaggcccttggagctgagctggaggaagtggagctgggtaacaagccacctacacccccgctgcaccagttttcatcctgggagagccggatctatgctgtggccacatcgggcatgcggctctcagatatgtctcccagaagtaatactgcatgctgcgcttcaagccctcctgcccttgtttcccctgggtctttctctggcctggtctacaagaatgtcactgtgcctgtctacacagcactgaaggggagagctacacagatcagcaacatgccctttatggacgagtcctctgggtctgacgatgactgcagctctcaggcgagtttccgaatctcggtcccctcctctgagtccaggaagaccagcggactaggcagcccccgggccatcaagagaggcgtctccatgtcctcactgagctccgagggtgactacgccatccccccggacgcctgctcactggacagtgactactcagagcctgagcacaaactgcagcgcacctcatcctactccaccgacgggctgggcctgggcggggagtcactggagaagtcgggctacctgctgaaaatggggagccaggtgaagacgtggaagaggcgctggtttgtcctgagacagggacagattatgtactacaagtccccgagtgatgtcatccggaaacctcaaggccaagtggatctgaactcccgctgccaaattgttcgaggggagggttcacagacgtttcagctcatctctgagaagaaaacctactacctgacggccgattcacccagcctgctggaggagtggatccgagtactccagagcctgctgaaggtgcaggccaccgggcctccagctctgcttcggggtggcaccaagcccaccgtgaagggctggctgaccaaggtaaagcatggccactccaaggtggtctggtgcgctcttgttgggaaaatcttctactactatcggagccatgaggacaagcgacccctgggctgcctgcctgtgcgggatgcgcacatagaggaagtagatcgatcctgtgactcagacgaggactatgaggctggaggaaccagacggttgctttcctcccactgcaccctggtgatccaccccacagagcacagccccacctacctcctcattggcaccaagcatgaaaaggatacgtggctctaccacctcacagtggctgcaggtggcagcagtgccaaggtgggcactgcctatgagcagctcattggaaaactgatggatggtgaaggagatccagattcgccgctctggaggcaccccatgctgtgctacagcaaagacggcctatacgcctccctcaccaccctgccctctgaggccttgcagacggaggccctcaagctcttcaagtcctgccagctcttcatcaacgtgccggtggaagctgcctcggtggactaccatgtgtccctggcccagaccgcactgcaggtctgcctggttcaccccgagctgcagagtgagatctactgccaactcatgaagcagaccagctgccgcccacctcagaagtactccctcatgcagtgctggcagctcctcgctctgtgtgctccacttttcctgcctcagcatcacttcctctggtatgtcaagcagcagctccaacgccatgcagatcccagaagtgaaactggccagtatgccacctactgccagcgggcagtggagcggaccctgcggaccggggagcgggaagccaggccatcgcgcatggaagtggtgtccatcctgctgcgtaaccccttccaccactccttgcccttcagcatccccgtgcactttaccaacgggacttaccatgtggttggttttgacggctcttccacggttgatgagttcctccagcggctgaaccaggagataggcatgagaaagccatcccactctggctttgccctcttcacggacgatccctcgggcagggacctggagcactgcctgcagggaagtgtcaagatctgtgatgccatctccaagtgggaacaagccatgaaggagctgcaccccggaaagtctgagggtgggacacgcgtcgtgaagctgatgtacaagaacaggctgtactttcgcagtcaagtcaaaggggagacggaccgagaacggctgctccttgcctctcaaaccagtagagagatagtggcagggaggtttcctatcaacaaggaattggctcttgagatggctgccctgatggcccaggtagaatatggggacttggagaagcctgccctgccaggccctggaggcacatcccctgccaaggctcagcatcttctccagcaggtcctagacaggttccaccccaggcgctatagacatggggcccccgctgaacagctgaggcacctggcagatatgttgaccacaaaatgggcaacattgcaaggatgctcccctcctgagtgcatccgcatctacctgaccgtggccaggaaatggcctttctttggtgctaaactttttgctgctcagcctgcccagctgtcttccaaggagaacgctctggtgtggattgctgtgaatgaggatggcgtcagcatcctggaccacaacactatgcaagtgcacatcacttacccctactcttcagtgacaacgtttggtggctgcagggatgacttcatgcttgtgattagatctatcccagacaagagctctggaaaaagccacattgagaagttgatcttccggatggctgctcccaagattgcagaagctaccttcatcatggccagctatatgaaccattgcactacaactgtgaacccccccaccaacccacccggagcctgccagctgtgggaactggatggacgacagttcttttcttctgtttcctgtgctaccaaggggccaacgttgctgtgaatatttctcctacccgattccccaacaccactagtgcctctggatttagagatatatatcctagggtatgatactactgtgacgggtctaacagcccccggctactcttgttctgtgaaatgtgtattttagtctctgtgaagcctttactctctaggtgccttataatgtttcagggctcaactttttaaaatccagacccagtgttaaaaccatttattccttttttcataagaataatgactccagatgctacctgattctagacatagacagggatgatccactgttactgagggcatcagtgctataagttaaggctttctgcactggtactctcaaggaagctaattttctttctggggggggcgggggacacagtgtcactatgtcacccagtccacagggttcaagcaattctcctgcctcagccttcggagtggctgggattacaggtgtgcgccaccatgcccggctaatttttgtatttttagtagagacggggtttcaccatgttggccaggctggtctcgaactcctgacctcaggtgatctgcccactttggcctcccaaagtgctgggattacaggcatgagccatcgcccagcccagaagctaattttttaatattgtatatggtcttatttatacttgaagttttgtgaacgtcgctaaacaggataggactaaaatttccaattctcctacactctgtcagaagcctagaactcactaaactgggctgcctttcccaaatgggaaaggtgctgacagagttggagaaaaaagaatagactcatttttccccattattggtatgtaggcattggtacagccccttctggggcagtctttgcaggataacatgctatacctgctaagattcaagctgttttcctcacactggactttaggccaaacccagtaccacgcaatgtgcaagcaagggcaggaggtaggtccaatctgacccctccctgtctcattttaatgactggacagcgctcggtgaaggctgtgttcactgtagtgggccatcatttgtttccttcttcttgtaaaagaccaagcaaatgcactctgctttttgctgctgtaagaccaccaaaaatgagtcagaaacacagaagactatttcaggcatgtgggcctggatatgctccttgagacttctggcaaacttctgctgggaattagtttgagggtgagggtacatatgtgacatttgccctagcctaagagtagcaggtaaaaaaaagtttctttcatcttttgccttactgataataccataatccccctcaattcagaccttctgattgagtgcagaggagactagacagtctcctctagacaggttgtagacacaccctcccctaacaaaaacaaaacgaaagagttcatactctgattttccaacatctaggaaactgagttttatttcctagctctaaggcagccttactatatgtcagtaaagtgctgaaaactgtatatttagcagtagcacccaaaaccaagcctttaaccccaacaatgtgtgtatcttttgcacagcaaaaactgcgaggccagaactagtttatctgaacacctcagctgctgtaagcttctcctctctcaccccgtaaactgacaagcatgatgaaaaaagaagcacatccaagtttctgcctcttttaaatgtacttgactttgcaaggcaagtagttttacagccatttctgttcacacttttcaccccacaacttggggatctagctgagacatttctacctcgaacaagtcacatgtaccacaggttcctgaataattcctgcagggctggtgacagacataacagctctggttttataatatcttgggtatctctaaggccaataaggataacattatctacccagagagtttagaagaaaagtaggagtccaaaggaagagtaaacaagaatggagctgtgttcacactgaatttggggtcaatctatttcccccaccctctctcctccccaacccttcaggaaccctttagtttattaatcttatacagaagaaactaacttagaaacaaaggattcaatatttgcttatttattctttgttaacatgagagtcccatgtctgaaaaccaaagtccaatttctgtctggccttttgtctcatccttcttggcaaaagtagcttttgaactgatataaaaaaaaatgctgagtaacagaaaagtattaatgtgcttgacaccatgactgaaatactatgatcttgtttgtcaataaaaagcagctatctgtgaaccaggtaac

SEQ ID NO: 764 - protein, 1364 aa, Homo sapiens
MAELKVEAPASVDWQKRCLTLETQLFRFRLQASKIRELLADKMQELEQRLLEAEQRAENAETQVGVMEEKVKLSNLKNVDSEGSLHRKYQELLKAIKGKDELISQLEAQLEKQKQMRAEEAKTVQEKAAKIKEWVTLKLAKLEMENQHLKSHNQRLVEQVGSLQDALEAIQIAPSRKLLVPPYGAAEQDSVPSEPGIQPMGQDSGSQAQGLKAAVLAPSPGALQSKDSVSEAASPLEDSSSSTVHSGETVEAKPLQPHLGRESPPHQPCMKLLTFRCSSASWGEGLVTAQRGMLPGTKTSAREGGPGSSLTLPKVRAPGTPRDSIQLAKRHHSQPQVGHGHFGRVVNIETEAFSALHPSGLPELESRARSREEPEKMEMEEPPPAGKNEERESPKALGAELEEVELGNKPPTPPLHQFSSWESRIYAVATSGMRLSDMSPRSNTACCASSPPALVSPGSFSGLVYKNVTVPVYTALKGRATQISNMPFMDESSGSDDDCSSQASFRISVPSSESRKTSGLGSPRAIKRGVSMSSLSSEGDYAIPPDACSLDSDYSEPEHKLQRTSSYSTDGLGLGGESLEKSGYLLKMGSQVKTWKRRWFVLRQGQIMYYKSPSDVIRKPQGQVDLNSRCQIVRGEGSQTFQLISEKKTYYLTADSPSLLEEWIRVLQSLLKVQATGPPALLRGGTKPTVKGWLTKVKHGHSKVVWCALVGKIFYYYRSHEDKRPLGCLPVRDAHIEEVDRSCDSDEDYEAGGTRRLLSSHCTLVIHPTEHSPTYLLIGTKHEKDTWLYHLTVAAGGSSAKVGTAYEQLIGKLMDGEGDPDSPLWRHPMLCYSKDGLYASLTTLPSEALQTEALKLFKSCQLFINVPVEAASVDYHVSLAQTALQVCLVHPELQSEIYCQLMKQTSCRPPQKYSLMQCWQLLALCAPLFLPQHHFLWYVKQQLQRHADPRSETGQYATYCQRAVERTLRTGEREARPSRMEVVSILLRNPFHHSLPFSIPVHFTNGTYHVVGFDGSSTVDEFLQRLNQEIGMRKPSHSGFALFTDDPSGRDLEHCLQGSVKICDAISKWEQAMKELHPGKSEGGTRVVKLMYKNRLYFRSQVKGETDRERLLLASQTSREIVAGRFPINKELALEMAALMAQVEYGDLEKPALPGPGGTSPAKAQHLLQQVLDRFHPRRYRHGAPAEQLRHLADMLTTKWATLQGCSPPECIRIYLTVARKWPFFGAKLFAAQPAQLSSKENALVWIAVNEDGVSILDHNTMQVHITYPYSSVTTFGGCRDDFMLVIRSIPDKSSGKSHIEKLIFRMAAPKIAEATFIMASYMNHCTTTVNPPTNPPGACQLWELDGRQFFSSVSCATKGPTLL

SEQ ID NO: 765 - DNA, 6789 bp, Homo sapiens
  CDS (431)..(2713)
tcccagccggcctccggggccctccgggctgaaatcgacatttgcctctggcaggaaaatgagcttgtcagtttctgcctccattagaccctcaacccaaaggagcaggagatttcggtagcgttttaactttatctcagaatctgaaagcggaaggccaggcaagctgcacacatcaagcgaaacgcctgaggggcggccagcgcgagggtttctggccatcgaccctcacctcccgggacttccagggtcttccccccaccccgcgcacacctccctgcctcgccccgagggcgtcacgtggcagcgtggggcccgcctcctggtgatgtcacggcgctcgcagccgtcgcgctgaagaaaggatgctcgaggatgctgtccaggtgggcggccgcgggcgcgatgcggcactgcaggtgtaattagcatggtcaatgcgggagcgatgagtggctctggaaacctgatggatttcctcgatgagccgttccctgatgtggggacgtatgaggacttccacaccatcgactggctaagggaaaagtcacgggacaccgacagacacaggaagatcaccagcaagagcaaggagtccatatgggagttcatcaagagcctgctggatgcctggtcgggatgggtggtgatgctgctcatcggcctgctggcgggcaccttggctggggtcatcgatctcgccgtggactggatgacggacctgaaggagggggtctgcctgtctgccttctggtatagccatgagcagtgttgctggacttctaacgagaccacttttgaggacagagacaagtgtcccctgtggcagaaatggtcggagctgctggtgaatcagtcagagggtgccagtgcttacattctgaattacttaatgtacatcctatgggcgctgctgtttgcatttttggctgtctccctggtgcgtgtatttgcaccatatgcctgtggctctggcataccagagataaagaccattttgagcggctttatcatcaggggctacttggggaagtggaccctgctaatcaagacagtcacgctggtgctggtagtgtcctccggtctgagccttgggaaggaagggccgctagtgcacgtggcttgttgctgtggcaacttcttcagcagccttttctccaagtacagcaagaatgagggcaagaggcgggaggtgctttcagctgcagcggctgctggagtctctgttgcctttggtgcaccaattggaggcgtgcttttcagtctagaagaggtcagttactactttcccctgaagaccttgtggaggtcatttttcgcagccctggtggcggcctttacgctgagatccatcaatccctttgggaatagccgtctcgttctcttttatgtggaataccacacgccctggtacatggctgaactcttccccttcatcctgcttggggtcttcgggggcttgtggggaaccctcttcatccgctgcaacatcgcctggtgcaggaggcgcaagaccaccaggctggggaagtacccggtgctggaggtcattgtggtgactgccatcactgccatcattgcctaccccaatccctacacacgccagagcaccagcgagctcatttctgagctgttcaatgactgtggagcccttgagtcttcccagctctgtgactacatcaatgaccccaacatgactcggcctgtggatgacattccagaccggccggctggtgtcggtgtttacacggccatgtggcagctggccctggcactgatcttcaaaatcgtcgttaccatatttacctttggcatgaagatcccgtcgggcctcttcatccccagcatggctgtgggcgcgatagcgggcaggatggtgggaattggcgtggagcagctggcctaccatcaccatgactggatcatcttcaggaactggtgcagacccggtgcagactgtgtcacgccagggctgtacgcaatggtgggagctgcggcctgcctcggtggagttaccaggatgacggtgtcattggtggtcatcatgtttgaattaaccgggggtctggagtacatcgtgcccctgatggcggcggctgtgaccagcaagtgggtagctgatgcatttgggaaagaaggcatctacgaggcccacatccacttaaatgggtaccctttccttgacgtgaaggacgagtttactcaccgcacactggccaccgacgtcatgcggccccggcggggagagccgccactgtcggtgctcacccaggacagcatgactgtcgaggacgtggagacgctcatcaaggagaccgactacaacggcttccccgtggtggtctccagagactccgagcgcctcattggatttgcccagaggagggaactgattctcgcaataaagaacgccagacagaggcaggagggcattgtgagcaattccatcatgtacttcacggaggaaccccccgagctgccggccaacagcccacatcccctgaagctgcggcgcatcctgaacctcagcccgtttacagtgacagaccacactccgatggaaacggtggtggatatcttccggaaactggggcttcggcagtgcctggtgacgcggagcgggagacttcttggcatcatcacaaaaaaggatgttctgagacatatggcccagatggcaaaccaggaccccgaatccatcatgtttaattagcaacaaggtggcaattattttcagaaaaacactgactgtgtcatttaaaaagaaataaatgatatgttattatcccaatgaaagatcatgcattggggacagcagaaacaaaagcttttttggaaaggcggggaagaaggatgaaacctttaaaaacaaaaacaaaaacatcaatgagtaggcattttatagctttaaccccgtatgagtttcaagctgtgtttcctaatgagtttgctactgctgtgggggcatgtgggtgggtaaatgatgtaaatgatgtgatctgtacaagtatgtggagcatgaatgctgactcaagaaacttttactccttctgctcaaggctgatgtttgtaacttatgaacacacgtgaagtgttgagtccaaaagacaaaggggcatcggcatgtcagcgtccttatttattggttcttgaagttttgctgctatgttactgaatcatactaaagacatttgcgcttactttgttgaaaaagaaaaagaaattaaatttgaacacagtgaaagctgcaagtatgccagtgggtccgctcacgaccgtcctgtttcttgctcctgttctcagcctgttatctggcttatccatcagtttctgaaccaacatcaggggcacctgccatgatgagtgtgaagaaatcatttctctatgcaagactggcatcctgggactgcacgatgaactattggagcatacagtactgcggtgtgtctcctcccatacaaagggacacatccttattttgagggtatactcacccgatcattgatttgcatccccatggcatttgcttcatttatttattgcttttgcccatgcattcaatattgatcagctcagcacttccatgggccatagccggtatgcccccagcctgccataagcgtgctttcattttcaagtagcatatgcaagagtccaaacaggctacccaatgttactacttatttttcctctcaggtcttatcagatacggctgtggagaggatgaggcatatgcgttgtcagttggaatccctccaaatggattgcaagagaaatactaaattgattctaaatctgttccattatcttctctgtaggatgcaaaacatccagttgtaatgtataagcatgcacttcatactagcaatcacagcacaggaggacagcattaaattttatatagccaatttgggcactgggcatctttgtatttgaacttaacgacacatttactcttttagtcaggatttcggtcttttctgcgggaaggaattaagctatgtattaggtccaccatacgatctgtgtaagtaagattatcccacttgccctttctctttagtctttgtcccttccttttcactaagtgcccctcatccttttcaatctcattgtcactggatagtgctgtatcacttaggtgtgcattcggctgcaaataacagaaaacccagcaaacactgaagggctggataagaaccctgagagggggtactccaggactgtctccataacatcattgggatccccatcccgttgctatttctttttcaccgtttttaccttttgtcctctggcttattgcctcagagttgcaagatggttcctgaactgtcaggtatcatgtctgctttctaagtgggaagaggaagggagaggcaagcaactaggtacaatgtctatcaggaaagcaaagcttccccagagacgctcagcttgtatccattgactggaagtctgtcacgtggctccccctagccgcacactagtgtgggaaggaaaatattgagctaggcacattactctctgaacgaaattcatattatcttattaaggaagagtgttggtcttcaggaggggaagtttgctgtattggatgccatcatcgtgtccttgtcattgcccttccggttttcattcttgctaaacccctgtgaatgttcttctaaccttcctgttccccaccccttttctcagatttgacctagaattcccagcccaaatccataatttcttagctctaatacgaattttcatgttggacaaaaacctagctacaaatgggtttctatggaacttctaattaatgtgcaaaatacatattttctccaggttaagaaattttaagtcagatcatgctgacacaataagaaaatttgtttgtgtaattcattgacctcttccttccaaaataacatcaagtagccacctcagtgtgacaatatccagtcaatagtagagaatttaatccttggtcctataaaagaataaaattcattgtcgtatttatagcacgtaagccttgagtaacaggtcttaatgttagtgttggtgttgtggtttctgcggaacgtttacaagtgaagttggattctcctgggctttaaatccaaaaagtcttaatgaccgcttcatgtagttcccctcttattcccctgtggtctcctcagagccagcgtgtgctgggaaagagtattagtcatagcctggctttatagaatccaggaggtccttttagctgaaacaagtggcttcaaaagggaacatgaaacagtgaaaagatagccaaaggtcagtgaaaccacagcatttctttctaatctggctgaggccatgggggggaatgaggggaaattatgcttccgggccaaggtcaccgagggggaccttgggatttgtgtcctccccagtgcttagagtagagatacctgcaaattcatggcaaacagttggaagagttacttgactgaaacaacccaatcttactttctttcgtaagttgaacctctgatttattgtggggttcaggctctcctcaatagaaggccagagttggacaggtggactaaggtcaaggatgaggagtctgcagtggggactaccacagcaaactgccttccttccgtggagtcctaactcagccatgtggtccactcacccaggggcccgggggctcagacaaaccccatggggaacatgctgccatgctctgtctttcttgtaaacgtagttgggtagggatcccaagggtatttgctctctccaaatgcagaacttccatccactttatctggtgatctgatgaacagcatggggacgtggaggtgaaataagcatctttcagaataaggtttttttttttttcctcttccagaaccaaaggctttagacatttgtagaactttctggattccttctgaatcgggttttaacataaaaaaccatcaacacatcatgggaaaggagctctttcatgatatacatcacatgtttcttgctctcactgaggaaatgtgttgtacaaaagcaccaaataagggcaccctggaagtgacatgtgtgtttcttctaagtcgtttttagtgcatcccctgcgattgcatgatgctcatgtggcttttagggaaaggcagaatgtgctagaagtcgaagtcattcaatattcagtgcttactgttactttgaaccaggtaatctcagttctttattcagtccttcccaaagaccttacaaaggagatgtgtaaactgatagattttgagcctaataagtcacagaaatggaaaattttagagcagtttgtttcacttaggtgagaactgattactttaaattaccaacatgtgcaaattctacttagtattcattattagatgctaagctggaaaagatgagaaacccaaggagaactattgaattaccacataattgtaatattatgctttaattttgtatgggcagtgttctatcagactaagcttctagcctttgaaatgatttacatgaggagagagcctgtatatctgacttgggaaacattaagcagaccctattttcactggcgcggtaataactatttatttgctatcctagaggtgctgggaatgagcctacgtgcgactttgatgagatatattcacatttggtgttggaacgaccacatagcaacgtgttggtttttttttattgtaacactctgtgtaaacgttgacaccttattaaatattaaatgtctgaactctatttttaaaaataaaacaagcacagagtctgcaacaaacatgtaaa

SEQ ID NO: 766 - protein, 760 aa, Homo sapiens
MVNAGAMSGSGNLMDFLDEPFPDVGTYEDFHTIDWLREKSRDTDRHRKITSKSKESIWEFIKSLLDAWSGWVVMLLIGLLAGTLAGVIDLAVDWMTDLKEGVCLSAFWYSHEQCCWTSNETTFEDRDKCPLWQKWSELLVNQSEGASAYILNYLMYILWALLFAFLAVSLVRVFAPYACGSGIPEIKTILSGFIIRGYLGKWTLLIKTVTLVLVVSSGLSLGKEGPLVHVACCCGNFFSSLFSKYSKNEGKRREVLSAAAAAGVSVAFGAPIGGVLFSLEEVSYYFPLKTLWRSFFAALVAAFTLRSINPFGNSRLVLFYVEYHTPWYMAELFPFILLGVFGGLWGTLFIRCNIAWCRRRKTTRLGKYPVLEVIVVTAITAIIAYPNPYTRQSTSELISELFNDCGALESSQLCDYINDPNMTRPVDDIPDRPAGVGVYTAMWQLALALIFKIVVTIFTFGMKIPSGLFIPSMAVGAIAGRMVGIGVEQLAYHHHDWIIFRNWCRPGADCVTPGLYAMVGAAACLGGVTRMTVSLVVIMFELTGGLEYIVPLMAAAVTSKWVADAFGKEGIYEAHIHLNGYPFLDVKDEFTHRTLATDVMRPRRGEPPLSVLTQDSMTVEDVETLIKETDYNGFPVVVSRDSERLIGFAQRRELILAIKNARQRQEGIVSNSIMYFTEEPPELPANSPHPLKLRRILNLSPFTVTDHTPMETVVDIFRKLGLRQCLVTRSGRLLGIITKKDVLRHMAQMANQDPESIMFN

SEQ ID NO: 767 - DNA, 963 bp, Homo sapiens
  CDS (1)..(963)
atggatgccacagcctgtaatgaatcagtggatggctcacccgtcttctatctattgggcatcccctctctgccagagaccttcttcctccctgtgttttttattttcctcctcttctaccttctcatcctgatgggtaatgccctgatcctggtggccgtggtggcagagcccagcctccacaagcccatgtacttctttctgatcaatctctccaccttggacatccttttcaccacaaccactgtccccaagatgctgtccttattcttgcttggggaccgcttcctcagcttttcttcctgcttactgcagatgtacctcttccaaagttttacatgttcagaagccttcatcctggtggtcatggcctatgaccgctatgtggctatctgccacccactgcactaccctgtcctcatgaacccacagaccaatgctaccttggcagccagtgcctggctaactgccctcctcctgcccatcccagcagtagtaaggacctcccagatggcatataacagcattgcctacatctaccactgcttctgtgatcatctggctgtggtccaggcctcctgctctgacaccaccccccagaccctcatgggcttctgcatcgccatggtggtgtccttcctcccccttctcctggtgcttctctcctatgtccacatcctggcctcagtgcttcgcatcagttccctagaaggacgggcaaaagccttctccacctgcagctcccaccttctggtcgtgggcacctactactcatctattgccatagcctacgtggcctacagggctgacctgccccttgacttccatatcatgggcaatgtggtatatgccattctcacaccaattctcaaccccctcatttacacgctgagaaacagggatgtaaaggcagccatcaccaaaatcatgtctcaagacccaggctgtgacaggagcatttga

SEQ ID NO: 768 - protein, 320 aa, Homo sapiens
MDATACNESVDGSPVFYLLGIPSLPETFFLPVFFIFLLFYLLILMGNALILVAVVAEPSLHKPMYFFLINLSTLDILFTTTTVPKMLSLFLLGDRFLSFSSCLLQMYLFQSFTCSEAFILVVMAYDRYVAICHPLHYPVLMNPQTNATLAASAWLTALLLPIPAVVRTSQMAYNSIAYIYHCFCDHLAVVQASCSDTTPQTLMGFCIAMVVSFLPLLLVLLSYVHILASVLRISSLEGRAKAFSTCSSHLLVVGTYYSSIAIAYVAYRADLPLDFHIMGNVVYAILTPILNPLIYTLRNRDVKAAITKIMSQDPGCDRSI

SEQ ID NO: 769 - DNA, 6218 bp, Homo sapiens
  CDS (52)..(6006)
gttaaatctgtggcctttgcatcgaagccatgctttcaagatgtaaaacctatggagctgacaccaggggcccaacagcaaggtataaattatcaagagttgacttcaggatggcaagatgtgaaatcaatgatgttggtaccagagccaactaggaagttcccatcaggaccactgttgactagtgtcagattttcaaatttgtctccagaatcacagcaacaggatgtgaaatctttggagtttactgtagagccaaagttgcaaagcgtaaaacatgtgaaattatcttcagtgtctctgcagcaaactataaaatctgtggaattagcaccagggtcactgcctcaaagagtgaaatatggggagcaaactccaagaacaaattatcaaatcatggaatcctctgaactaatccctagaccagggcatcagtttgcaaaatatgcagagatgatcccacagccaaagtatcaaatccctaaatctgcaaatttgatttcaataccaatttatcacgccacagaatcttcagaaatggcacaaggattggcatataaaggcatagatactgtagagaaatctgtggggttgaccccaaagctaacaggtagagctaaggaatccttagggatgctgctgcagccagatcttcaggtaccaaaatttgttgatctgactccaatggtaagggatcaaggctcaaaattcttaggattaactccagagaaaagctaccaaatcctagaaactatggaattgctctctcagtcacggccccgagttaaggatgtgggggagttatatatgaagccactgcagcaaactgtggaatatgaagggattactccggaactcaagcattactttacagaagctatggggttgaccgctgaggcaaggatacaagcaaatgaattctttggaatgaccccaaagccaacaagtcaagccactggatttgcagagagatccccaaggctctgtcctcaaaacttagaatgtgtggaggtgatctctgagaaaagactgcaaggggaagaatctgtggtattgattccaaagtcattacatcacgtcccagattctgcttcagggatgacacctgggttaggacatcgagttcctgaatctgtggagttgacttctaagtcaggagtgcaggtagagaaaactttgcaattaacccccaaaccacagcatcatgtgggatctccagggataatatcagggttaggacatcaagtcccagaatctgtaaatctgacctgtaagcaatggctacaaatggaggaatctttagaggtgcccctgaagcaaacaagtcaagttataggacatgaagaatctgtagagctcacctctgaggcacggcagcacagggaggtatcaatggggctaacaaagtcaaagaatcaaagtatgaaatctccagggacaaccccaggaccactgggtcgaattgtagaatttatgaggattagtccagagccactagatcaagtcacagaatctgcaaggacacagcttcaagttgctcaatctgaagaggtaatcctcatagatgtcccaaaagttgttcaatctgtgaaagtgacccctggaccaccatttcaaattgtaaagtctgtgacgataccaaggccaacccctcaaatggtagaatatattgagttgactccaaaactgcaatatgtgagaccttcagagcaccacacagggccatgtttgcaagatgtgaaatctacaaaattaatcacaaagccaaaacaccagattttggaaacagtggagttgacagggtttcaaattgtaaaaactatgttaatcccagggccatcccttcaaatcgtaaaatctgaggagttagcaccaggaccaattcctcaggttgtagaaccaataggagtagccctagaatcaggaattgaagcaataaattgtgtggatttacttccaaggccacatcttcaagaactgatagtacctgcagaattaactccaagtccatgtactcaagtgaagtctgcagaattaacctcaccgcaaacatctccatttgaggaacatacaatattgactcataaacaagggcttcaggctgtgaaatctacagtgataaaaacagagcctcctaaagttatggaaactgaggatttgaatctaggacacgtgtgtcagaatagggactgtcagaagttaacatcagaagagttacaagtagggactgacttctctaggttcctacaaagctcttcaaccacactcatttcaagctctgtcagaacagcatctgaattaggaggactttgggattctgggatacaggaagtatccagagctttggatataaaaaaccctgggacagatattttgcagcctgaagagacctatatagaccctactatgatacaatctttaacttttcctttggcccttcataatcaaagctccgataagacagctaacattgtggaaaacccatgtcctgagattctaggagtggatgtaatatctaaagagacaactaagaggaagcaaatggaggagctagagaactcacttcagagacatctaccacaaagctggagatcacgatctaggacattccaggcagaatcaggggttcagaaaggtctcatcaagtctttcccgggcagacaacacaatgtctgggagagtcatgcctggaggcagcgactaccaagaaaatatctctccactatgctaatgctggggaatattttagggaccactatggaaaggaagctttgttctcaaacatctttagcagaaagagccactgcagatacctgtcaatctattcagaatttatttgggattccagctgaactgatggaaccttcccagagcctgccagagaagggtccagttactatttctcagccttctgtggtcaaaaactatattcagagacatactttttatcatggtcataagaaaagaatggccttaaggatatggacacgtggctccacatcttccataatacagcaatactctgggactagagtgagaataaagaagacaaactcaacgttcaatggtatatcccaagaagtcattcaacatatgcctgtctcatgtgcagggggccagcttcctgtcctggtaaagtcagagtcttccctcagcatattttacgatagagaagatcttgttccaatggaagaaagtgaggactcacagagtgattcccagacaaggatttctgagtcccaacactccctcaagccaaattatctttcccaggccaagactgacttctcagaacagttccagttgctagaagatctgcagctaaaaatagcagcaaaactcttaaggagtcaaataccccccgatgtgcctccacctctagcttcaggtctagtcctaaaataccctatctgcctacagtgtggccgatgttcaggacttaattgccatcataaattacagaccacttcggggccttatcttcttatctatccacagctccaccttgtacgcactcctgaaggccatggtgaggttcggttgcatcttggctttaggctgagaattgggaaaagatcccaaatctcaaagtatcgtgaaagagatagacccgtcatacggagaagccctatatcaccatcacaaaggaaagctaaaatctatactcaagcttccaagagtcctacttccacaatagatttgcagtctgggccttcccagtcccctgctcctgtacaagtctacatcaggcgaggacaacgcagcaggcctgacttagtagaaaagacaaaaactagagcacctgggcactatgaattcactcaagttcacaacctaccagagagtgactctgaaagcactcagaatgaaaaacgggctaaagtgagaaccaaaaagacctctgattcaaaatatccaatgaagagaatcaccaagcgacttagaaaacacagaaagttctacacaaacagtagaaccacaatagagagtccttctagggaattagcagcccatttaagaaggaagaggattggagcaactcagacaagtactgcctctttaaaaagacaacctaagaaaccttcccaacccaagttcatgcaactgctttttcagagcctaaagcgggcattccaaacagcacacagagttatagcttctgttgggcggaagcctgtggacgggacaaggccagacaatttgtgggcaagcaaaaactattatccaaaacaaaatgccagggactattgcttaccaagcagtatcaaaagagacaagaggtcagctgacaagctaacgccagcaggctcaaccattaagcaggaggacatattgtggggaggaacggtccagtgcagatcagctcaacagccaagaagagcttactctttccaacccagacctcttcgactgcccaagcccacagattcccaaagtggtattgctttccaaactgcctcagtggggcagcctctgagaactgttcaaaaggacagtagtagcagatcaaagaaaaacttctatagaaatgaaacctccagccaggagtctaagaacttgtccacaccaggaaccagagttcaggcccgaggaagaatcctacctggttcccctgtgaagagaacctggcaccgacatcttaaagacaaactcacacacaaggagcataaccaccccagcttctatagggagagaaccccacgcggtccttctgagagaacccgtcataacccctcttggagaaaccatcgcagtccctctgagagaagccaacgcagttccttggagagaagacatcacagtccctctcagaggagccactgcagtccctctaggaaaaaccattccagtccttctgagagaagctggcgcagtccgtctcagagaaatcactgcagtccccccgagaggagctgtcacagtctctctgaaaggggccttcacagtccctctcagaggagccatcgcggtccctctcagagaagacatcacagtccctcagagagaagccatcgcagtccctcagagagaagccatcgcagttcctctgagagaagacatcgcagtccctcccagaggagccatcgcggtccctcagagagaagccattgcagtccctctgagagaagacatcgcagtccctctcagaggagccatcgtggtccctctgagagaagacatcacagtccctctaagagaagccatcgcagtcccgctcggaggagccatcgcagtccctcagagagaagccatcacagtccctctgagagaagccatcacagtccctctgagagaagacatcacagtccctctgagagaagccattgcagtccctctgagagaagccattgcagtccctctgagagaagacatcgcagtccctctgagagaagacatcacagtccctcagagaaaagccatcacagtccctctgagagaagccatcacagtccctctgagagaagacgtcacagtcccttggagaggagccgtcacagtctcttggagaggagccatcgcagtccctctgagaggagatctcacaggtcctttgagaggagccatcgtaggatttctgagagaagtcacagtccctcagagaagagccacctcagtcccttggaaagaagccgttgcagtccctctgagaggagaggacacagttcctctgggaaaacctgtcacagtccctctgagagaagccatcgcagtccctccgggatgaggcaagggaggacctctgagaggagccatcgcagttcctgtgagagaacccgtcacagtccctctgagatgaggccagggaggccctctgggaggaaccattgcagtccctctgagaggagccgacgcagtccccttaaggagggactcaagtacagtttccctggagagaggcccagccatagtttgtctagagatttcaagaatcaaacaactctcctcgggaccacacataaaaatcccaaagcagggcaagtgtggaggcctgaagctactcgatgaggcgaggtccgcccctattattcattgtcctaagtcttcatcgtgctgccctttccaggcttctttcctgctcagccactgcctccaattcctgcgcccccagcgtggaaaggcttccatttctctctaccgggggggaggcgggtgagaatgggtctgtaatttctctaagatgaataaaggggcagtaaatgaaaaaaaaaaaaaaaaaa

SEQ ID NO: 770 - protein, 1984 aa, Homo sapiens
MELTPGAQQQGINYQELTSGWQDVKSMMLVPEPTRKFPSGPLLTSVRFSNLSPESQQQDVKSLEFTVEPKLQSVKHVKLSSVSLQQTIKSVELAPGSLPQRVKYGEQTPRTNYQIMESSELIPRPGHQFAKYAEMIPQPKYQIPKSANLISIPIYHATESSEMAQGLAYKGIDTVEKSVGLTPKLTGRAKESLGMLLQPDLQVPKFVDLTPMVRDQGSKFLGLTPEKSYQILETMELLSQSRPRVKDVGELYMKPLQQTVEYEGITPELKHYFTEAMGLTAEARIQANEFFGMTPKPTSQATGFAERSPRLCPQNLECVEVISEKRLQGEESVVLIPKSLHHVPDSASGMTPGLGHRVPESVELTSKSGVQVEKTLQLTPKPQHHVGSPGIISGLGHQVPESVNLTCKQWLQMEESLEVPLKQTSQVIGHEESVELTSEARQHREVSMGLTKSKNQSMKSPGTTPGPLGRIVEFMRISPEPLDQVTESARTQLQVAQSEEVILIDVPKVVQSVKVTPGPPFQIVKSVTIPRPTPQMVEYIELTPKLQYVRPSEHHTGPCLQDVKSTKLITKPKHQILETVELTGFQIVKTMLIPGPSLQIVKSEELAPGPIPQVVEPIGVALESGIEAINCVDLLPRPHLQELIVPAELTPSPCTQVKSAELTSPQTSPFEEHTILTHKQGLQAVKSTVIKTEPPKVMETEDLNLGHVCQNRDCQKLTSEELQVGTDFSRFLQSSSTTLISSSVRTASELGGLWDSGIQEVSRALDIKNPGTDILQPEETYIDPTMIQSLTFPLALHNQSSDKTANIVENPCPEILGVDVISKETTKRKQMEELENSLQRHLPQSWRSRSRTFQAESGVQKGLIKSFPGRQHNVWESHAWRQRLPRKYLSTMLMLGNILGTTMERKLCSQTSLAERATADTCQSIQNLFGIPAELMEPSQSLPEKGPVTISQPSVVKNYIQRHTFYHGHKKRMALRIWTRGSTSSIIQQYSGTRVRIKKTNSTFNGISQEVIQHMPVSCAGGQLPVLVKSESSLSIFYDREDLVPMEESEDSQSDSQTRISESQHSLKPNYLSQAKTDFSEQFQLLEDLQLKIAAKLLRSQIPPDVPPPLASGLVLKYPICLQCGRCSGLNCHHKLQTTSGPYLLIYPQLHLVRTPEGHGEVRLHLGFRLRIGKRSQISKYRERDRPVIRRSPISPSQRKAKIYTQASKSPTSTIDLQSGPSQSPAPVQVYIRRGQRSRPDLVEKTKTRAPGHYEFTQVHNLPESDSESTQNEKRAKVRTKKTSDSKYPMKRITKRLRKHRKFYTNSRTTIESPSRELAAHLRRKRIGATQTSTASLKRQPKKPSQPKFMQLLFQSLKRAFQTAHRVIASVGRKPVDGTRPDNLWASKNYYPKQNARDYCLPSSIKRDKRSADKLTPAGSTIKQEDILWGGTVQCRSAQQPRRAYSFQPRPLRLPKPTDSQSGIAFQTASVGQPLRTVQKDSSSRSKKNFYRNETSSQESKNLSTPGTRVQARGRILPGSPVKRTWHRHLKDKLTHKEHNHPSFYRERTPRGPSERTRHNPSWRNHRSPSERSQRSSLERRHHSPSQRSHCSPSRKNHSSPSERSWRSPSQRNHCSPPERSCHSLSERGLHSPSQRSHRGPSQRRHHSPSERSHRSPSERSHRSSSERRHRSPSQRSHRGPSERSHCSPSERRHRSPSQRSHRGPSERRHHSPSKRSHRSPARRSHRSPSERSHHSPSERSHHSPSERRHHSPSERSHCSPSERSHCSPSERRHRSPSERRHHSPSEKSHHSPSERSHHSPSERRRHSPLERSRHSLLERSHRSPSERRSHRSFERSHRRISERSHSPSEKSHLSPLERSRCSPSERRGHSSSGKTCHSPSERSHRSPSGMRQGRTSERSHRSSCERTRHSPSEMRPGRPSGRNHCSPSERSRRSPLKEGLKYSFPGERPSHSLSRDFKNQTTLLGTTHKNPKAGQVWRPEATR

SEQ ID NO: 771 - DNA, 846 bp, Homo sapiens
  CDS (1)..(531)
atgcgccctccgcccgcggttcagccccggcacagccggctcgactccggtcctcgcggccggccggctaagttcccgcgagggaccgcctacccactctccccgccccgggaagaactgcgccgctcccgggatttttcggactcgcccagcagcttgcgagcgggcgggcagccgccggggcagagcgcaggcggaaaacgaaagcgcagcacgagtcgcggccgctttgtctcgggcgccgcgggcctgacggggacagcgcgggctgggagcgccggcaagggcggccctcgcgcacctggctgccagcccgcagggggctcgcacgcagacctgcccttgccacctcagcgctcgggtgcgggctgggggcggtggagccacgaaaggtggtgccgagagcggagcgcaggacagcgcaggagccccggcgcatcgcggcgcgcacagacccaggattacttcatgcacataaaagaaaacgcaactacagtggaccctgaacaacctatggcctgcagccactgaagaatgcttgcataaggagctcttctctgcacataccccgacacagtgatggtatcttgcagctgctgcttctgtccaaggcactgcagcctactcgtcaaaagcccgaagcccagctctgccagcagtgcactgtgtgctcttaggaaacagagaagcaaagaagttagcaagcttgttttggcagaagaaaaaacacaaaatacccaaccacagatcctcaaaaatattgctaagcactaattttgctaacatgttagacagccttcggatctaggcaatcttgttcctcagctggaaagagttcctgccagc

SEQ ID NO: 772 - protein, 176 aa, Homo sapiens
MRPPPAVQPRHSRLDSGPRGRPAKFPRGTAYPLSPPREELRRSRDFSDSPSSLRAGGQPPGQSAGGKRKRSTSRGRFVSGAAGLTGTARAGSAGKGGPRAPGCQPAGGSHADLPLPPQRSGAGWGRWSHERWCRERSAGQRRSPGASRRAQTQDYFMHIKENATTVDPEQPMACSH

SEQ ID NO: 773 - DNA, 4298 bp, Homo sapiens
  CDS (157)..(3858)
catcgcgagtgtccttgagccgcgggtgacggtggctctcgctgctcgcgccccctcctcccgcggggggagcctgatgccacgttccctatgaattatttatcgccggcctaaaaataccccgaacttcacagcccgagtgaccctccggtggacatgggtggggccctggggccggccctgttgctcacctcgctcttcggtgcctgggcagggctgggtccggggcagggcgagcagggcatgacggtggccgtggtgtttagcagctcagggccgccccaggcccagttccgtgcccgcctcaccccccagagcttcctggacctacccctggagatccagccgctcacagttggggtcaacaccaccaaccccagcagcctcctcacccagatctgcggcctcctgggtgctgcccacgtccacggcattgtctttgaggacaacgtggacaccgaggcggtggcccagatccttgacttcatctcctcccagacccatgtgcccatcctcagcatcagcggaggctctgctgtggtcctcacccccaaggagccgggctccgccttcctgcagctgggcgtgtccctggagcagcagctgcaggtgctgttcaaggtgctggaagagtacgactggagcgccttcgccgtcatcaccagcctgcacccgggccacgcgctcttcctggagggcgtgcgcgccgtcgccgacgccagccacgtgagttggcggctgctggacgtggtcacgctggagctgggcccgggagggccgcgcgcgcgcacgcagcgcctgctgcgccagctcgacgcgcccgtgtttgtggcctactgctcgcgcgaggaggccgaggtgctcttcgccgaggcggcgcaggccggtctggtggggcccggccacgtgtggctggtgcccaacctggcgctgggcagcaccgatgcgccccccgccaccttccccgtgggcctcatcagcgtcgtcaccgagagctggcgcctcagcctgcgccagaaggtgcgcgacggcgtggccattctggccctgggcgcccacagctactggcgccagcatggaaccctgccagccccggccggggactgccgtgttcaccctgggcccgtcagccctgcccgggaggccttctacaggcacctactgaatgtcacctgggagggccgagacttctccttcagccctggtgggtacctggtccagcccaccatggtggtgatcgccctcaaccggcaccgcctctgggagatggtggggcgctgggagcatggcgtcctatacatgaagtaccccgtgtggcctcgctacagtgcctctctgcagcctgtggtggacagtcggcacctgacggtggccacgctggaagagcggccctttgtcatcgtggagagccctgaccctggcacaggaggctgtgtccccaacaccgtgccctgccgcaggcagagcaaccacaccttcagcagcggggacgtggccccctacaccaagctctgctgtaagggattctgcatcgacatcctcaagaagctggccagagtggtcaaattctcctacgacctgtacctggtgaccaacggcaagcatggcaagcgggtgcgcggcgtatggaacggcatgattggggaggtgtactacaagcgggcagacatggccatcggctccctcaccatcaatgaggaacgctccgagatcgtagacttctctgtaccctttgtggagacgggcatcagtgtgatggtggctcgcagcaatggcaccgtctccccctcggccttcttggagccatatagccctgcagtgtgggtgatgatgtttgtcatgtgcctcactgtggtggccatcaccgtcttcatgttcgagtacttcagccctgtcagctacaaccagaacctcaccagaggcaagaagtccgggggcccagctttcactatcggcaagtccgtgtggctgctgtgggcgctggtcttcaacaactcagtgcccatcgagaacccgcggggcaccaccagcaagatcatggttctggtctgggccttctttgctgtcatcttcctcgccagctacacggccaacctggccgccttcatgatccaagagcaatacatcgacactgtgtcgggcctcagtgacaagaagtttcagcggcctcaagatcagtacccacctttccgcttcggcacggtgcccaacggcagcacggagcggaacatccgcagtaactaccgtgacatgcacacccacatggtcaagttcaaccagcgctcggtggaggacgcgctcaccagcctcaagatggggaagctggatgccttcatctatgatgctgctgtcctcaactacatggcaggcaaggacgagggctgcaagctggtcaccattgggtctggcaaggtctttgctaccactggctacggcatcgccatgcagaaggactcccactggaagcgggccatagacctggcgctcttgcagttcctgggggacggagagacacagaaactggagacagtgtggctctcagggatctgccagaatgagaagaacgaggtgatgagcagcaagctggacatcgacaacatggcaggcgtcttctacatgctgctggtggccatggggctggccctgctggtcttcgcctgggagcacctggtctactggaagctgcgccactcggtgcccaactcatcccagctggacttcctgctggctttcagcaggggcatctacagctgcttcagcggggtgcagagcctcgccagcccaccgcggcaggccagcccggacctcacggccagctcggcccaggccagcgtgctcaagatgctgcaggcagcccgcgacatggtgaccacggcgggcgtaagcagctccctggaccgcgccactcgcaccatcgagaattggggtggcggccgccgtgcgcccccaccgtccccctgcccgaccccgcggtctggccccagcccatgcctgcccacccccgacccgcccccagagccgagccccacgggctggggaccgccagacgggggtcgcgcggcgcttgtgcgcagggctccgcagcccccgggccgccccccgacgccggggccgcccctgtccgacgtctcccgagtgtcgcgccgcccagcctgggaggcgcggtggccggtgcggaccgggcactgcgggaggcacctctcggcctccgagcggcccctgtcgcccgcgcgctgtcactacagctcctttcctcgagccgaccgatccggccgccccttcctcccgctcttcccggagctggaggacctgccgctgctcggtccggagcagctggcccggcgggaggccctgctgcacgcggcctgggcccggggctcgcgcccgcgtcacgcttccctgcccagctccgtggccgaggccttcgctcggcccagctcgctgcccgctgggtgcaccggccccgcctgcgcccgccccgacggccactcggcctgcaggcgcttggcgcaggcgcagtcgatgtgcttgccgatctaccgggaggcctgccaggagggcgagcaggcaggggcccccgcctggcagcacagacagcacgtctgcctgcacgcccacgcccacctgccattttgctggggggctgtctgtcctcaccttccaccctgtgccagccacggctcctggctctccggggcctgggggcctctggggcacaggggcaggactctggggctgggcacaggctacagagacagtgggggactggacgagatcagcagggtagcccgtgggacgcaaggcttcccgggaccctgcacctggagacggatctccagtctggagtcagaagtgtgagttatcagccactcaggctccgagccagctggattctctgcctgccactgtcagggttaagcggcaggcaggattgggcttttctggcttctaccatgaaatcctggccatgggaccccagtgacagatgatgtcttccatggtcatcagtgacctcagtagcctcaaatcatggtgagggctgggcttttgctgtcctcttctcacgcagagttctgccaggagggtgtgctgtgggggtcagactcctgaggctctcccttccctggggctagccagttactggtcatggctgctgtgggcatggaggctggaacttgtggttgaggcagggccatcccgatccttgctctacctggctagagtttcttctcatcagagcactgggacattaaacccaccttttcccagaaaaaaaaaaaaaaaaaaaaaaaaaaaaa

SEQ ID NO: 774 - protein, 1233 aa, Homo sapiens
MGGALGPALLLTSLFGAWAGLGPGQGEQGMTVAVVFSSSGPPQAQFRARLTPQSFLDLPLEIQPLTVGVNTTNPSSLLTQICGLLGAAHVHGIVFEDNVDTEAVAQILDFISSQTHVPILSISGGSAVVLTPKEPGSAFLQLGVSLEQQLQVLFKVLEEYDWSAFAVITSLHPGHALFLEGVRAVADASHVSWRLLDVVTLELGPGGPRARTQRLLRQLDAPVFVAYCSREEAEVLFAEAAQAGLVGPGHVWLVPNLALGSTDAPPATFPVGLISVVTESWRLSLRQKVRDGVAILALGAHSYWRQHGTLPAPAGDCRVHPGPVSPAREAFYRHLLNVTWEGRDFSFSPGGYLVQPTMVVIALNRHRLWEMVGRWEHGVLYMKYPVWPRYSASLQPVVDSRHLTVATLEERPFVIVESPDPGTGGCVPNTVPCRRQSNHTFSSGDVAPYTKLCCKGFCIDILKKLARVVKFSYDLYLVTNGKHGKRVRGVWNGMIGEVYYKRADMAIGSLTINEERSEIVDFSVPFVETGISVMVARSNGTVSPSAFLEPYSPAVWVMMFVMCLTVVAITVFMFEYFSPVSYNQNLTRGKKSGGPAFTIGKSVWLLWALVFNNSVPIENPRGTTSKIMVLVWAFFAVIFLASYTANLAAFMIQEQYIDTVSGLSDKKFQRPQDQYPPFRFGTVPNGSTERNIRSNYRDMHTHMVKFNQRSVEDALTSLKMGKLDAFIYDAAVLNYMAGKDEGCKLVTIGSGKVFATTGYGIAMQKDSHWKRAIDLALLQFLGDGETQKLETVWLSGICQNEKNEVMSSKLDIDNMAGVFYMLLVAMGLALLVFAWEHLVYWKLRHSVPNSSQLDFLLAFSRGIYSCFSGVQSLASPPRQASPDLTASSAQASVLKMLQAARDMVTTAGVSSSLDRATRTIENWGGGRRAPPPSPCPTPRSGPSPCLPTPDPPPEPSPTGWGPPDGGRAALVRRAPQPPGRPPTPGPPLSDVSRVSRRPAWEARWPVRTGHCGRHLSASERPLSPARCHYSSFPRADRSGRPFLPLFPELEDLPLLGPEQLARREALLHAAWARGSRPRHASLPSSVAEAFARPSSLPAGCTGPACARPDGHSACRRLAQAQSMCLPIYREACQEGEQAGAPAWQHRQHVCLHAHAHLPFCWGAVCPHLPPCASHGSWLSGAWGPLGHRGRTLGLGTGYRDSGGLDEISRVARGTQGFPGPCTWRRISSLESEV

SEQ ID NO: 775 - DNA, 3411 bp, Homo sapiens
  CDS (101)..(2809)
cttctcttgtgtaatcagctgcctatttggaaattgggcagggtttgcgactggatgctaatgtcactgactagttttcagcctaccatccagaagtaacatgttcccagctttggaaacgcacctaaagcagactattcctgatccttatgaagactttatgtaccgtcacctccaatattatggctactttaaagctcagagaggcagtttaccaaactctgctacgcatcagcatgttcggaagaataaccctcaatgcctgttgaatggctctcttggggaaaaagatgatttgataccagacaccctgcaaaaggagaagcttctatggcctatcagtttatcttcagctgtgcacagacagatagaagccatcaacagagactttcactcttgcctgggctggatgcagtggcgcggcctcagctcactgcaacctccacctcccagattcaaggattctcctgcctcagctttccgagtagctgggattacagattcacatatgctgagtttaccacatcttaggagcagacagcttctttatgatgagttggatgaagtaaacccacgtcttcgagaaccccaagagctcttttccattttgtctaccaagaggccactgcaggctccaagatggccaattgaatgtgaggtcatcaaggaaaacatccatcatattgagtgggctccacctcaaccagaatatttctatcagcctaaaggaaatgaaaaggtaccagagattgtaggagagaaaaaaggaacagttgtctatcaattagattcagtgcctatagaaggttcctattttaccagttccagagtgggaggcaaacgaggaattgtcaaggaacttgctgtcacgttgcaaggaccagaagataatactctactgtttgaatcaaggtttgagagtgggaatctgcaaaaagctgtcagagtagacacctatgagtatgaactcaccttgcgaactgacctctacactaacaaacacactcagtggttttattttcgtgttcagaacaccagaaaagatgctacctatcgcttcaccattgtcaacttgctaaaacccaagagtctttatactgtagggatgaagccactcttgtactcccaattggatgccaacacccgcaatattggctggaggagagaaggaaatgaaatcaagtactacaagaacaacacggatgatgggcagcagcccttctactgtctcacgtggaccattcagtttccatatgaccaggacacttgcttctttgcacacttctacccatatacatacactgatttgcaatgctacctcctgtcagtggcaaacaaccctatccagtctcagttctgcaagctccaaactttatgcaggagcctagcaggaaataccgtttacttgctcaccatcaccaacccatcccagacccctcaagaggcagctgcaaagaaagctgtggtcttgagtgccagagttcaccctggagaaagtaatggctcctgggttatgaaaggctttttggacttcatccttagcaactccccagatgcccagctcctcagagatatttttgtcttcaaggtgcttcccatgttaaatccagatggtgtgattgtggggaattatcggtgttccttggccggaagggatttgaacaggcattataaaaccattctgaaggagtctttcccttgtatttggtacaccaggaacatgatcaaaagacttcttgaagaaagagaggttctgttgtattgtgatttccatggccacagtcgtaagaataatatcttcctgtatggctgtaataacaacaatcgcaaatactggcttcatgaacgagtctttcctttaatgttatgcaaaaatgcaccagataagttctcttttcacagttgtaattttaaggtccaaaaatgcaaagaaggaacaggacgagttgttatgtggcggatgggaatcctaaacagctacaccatggagtctacctttggcgggtccaccctgggtaataaaagagacacccactttaccatcgaagatctgaagtccttaggttatcatgtctgtgacacccttctggacttttgtgatcctgaccaaatgaagttcactcagtgtctagcagagcttaaggagcttttacgacaggaaatccacaagaaattccatgaacttggacaagatgtagatttagaaggaagttggagtgacatctctttgtctgacattgaatccagcaccagtggctctgacagttctctctcagatggtcttcctgttcacctagcaaacatagcagatgagctgactcagaaaaagaagatgtttaagaagaaaaaaaagaagtcacttcagactaggaaacagcgaaatgagcagtatcagaaaaaaaatttgatgcagaagttaaagttaacagaagatacctcagaaaaggcaggatttgcttctactctgcaaaagcagccaacctttttcaaaaactcagagaattccagttttttaccaatgaaaaatgaaaacccaaggttaaatgagacaaatttaaatagaagagacaaagacacccccctggacccatcaatggccaccctgattctgcctaagaataaagggagaatgcagaataagaagccaggctttacagtatcatgctctccaaagagaaccataaactccagccaagagccagctccaggtatgaagccaaactggcctaggagcagatatcctgccacaaagagaggctgtgctgccatggcggcatacccatccttgcacatatacacatacccgtaggtgagcctgggctgtgccacacaagcacttcatcgggggttttgagattagacacattttataatgggggagatgtatgactgggaactgcatttacttgtggtatactgtgttgtgcactcatgcactgaccttacactttgtacttacactgtgggcatgtggtcaagatgcatacctcatgaattcaactattttttcataaaatgaaattttattatgatgtgtaaaaatgctttatcagaaactgaagtgtgttctcatggcacacttcatggcagcacagatatacctcattttaaccaatagatattctctctaaaattatgtgcaaatcaatttttaaaaatcaaaatctatgttaaacacattttggcagtgtgctataataaaaaaaagtgttgtgtcaaagctttctagtgacggtcagtcctactgctgtatgtcaggtttgctcacaatgaggtattcccacatagaaataacaatgcatgtattacccagaatttaatgttgcgtaccttatgttcaatgaggttttgtaatttttttaggctgatgattaaaattctttctctctaaaaaaaaaaaaaaaaaaaaaa

SEQ ID NO: 776 - protein, 902 aa, Homo sapiens
MFPALETHLKQTIPDPYEDFMYRHLQYYGYFKAQRGSLPNSATHQHVRKNNPQCLLNGSLGEKDDLIPDTLQKEKLLWPISLSSAVHRQIEAINRDFHSCLGWMQWRGLSSLQPPPPRFKDSPASAFRVAGITDSHMLSLPHLRSRQLLYDELDEVNPRLREPQELFSILSTKRPLQAPRWPIECEVIKENIHHIEWAPPQPEYFYQPKGNEKVPEIVGEKKGTVVYQLDSVPIEGSYFTSSRVGGKRGIVKELAVTLQGPEDNTLLFESRFESGNLQKAVRVDTYEYELTLRTDLYTNKHTQWFYFRVQNTRKDATYRFTIVNLLKPKSLYTVGMKPLLYSQLDANTRNIGWRREGNEIKYYKNNTDDGQQPFYCLTWTIQFPYDQDTCFFAHFYPYTYTDLQCYLLSVANNPIQSQFCKLQTLCRSLAGNTVYLLTITNPSQTPQEAAAKKAVVLSARVHPGESNGSWVMKGFLDFILSNSPDAQLLRDIFVFKVLPMLNPDGVIVGNYRCSLAGRDLNRHYKTILKESFPCIWYTRNMIKRLLEEREVLLYCDFHGHSRKNNIFLYGCNNNNRKYWLHERVFPLMLCKNAPDKFSFHSCNFKVQKCKEGTGRVVMWRMGILNSYTMESTFGGSTLGNKRDTHFTIEDLKSLGYHVCDTLLDFCDPDQMKFTQCLAELKELLRQEIHKKFHELGQDVDLEGSWSDISLSDIESSTSGSDSSLSDGLPVHLANIADELTQKKKMFKKKKKKSLQTRKQRNEQYQKKNLMQKLKLTEDTSEKAGFASTLQKQPTFFKNSENSSFLPMKNENPRLNETNLNRRDKDTPLDPSMATLILPKNKGRMQNKKPGFTVSCSPKRTINSSQEPAPGMKPNWPRSRYPATKRGCAAMAAYPSLHIYTYP

SEQ ID NO: 777 - DNA, 8617 bp, Homo sapiens
  CDS (235)..(3729)
acgacgggggaggtgctgtacgtccaagatggcggcgccctgtaggctggagggactgtgaggtaaacagctgagggggaggagacggtggtgaccatgaaagacaccaggttgacagcactggaaactgaagtaccagttgtcgctagaacagtttggtagtggccccaatgaagaaccttcagaacctgtagcacacgtcctggagccagcacagcgccttcgagcgagagaatggcccaacaagcaaatgtcggggagcttcttgccatgctggactcccccatgctgggtgtgcgggacgacgtgacagctgtctttaaagagaacctcaattctgaccgtggccctatgcttgtaaacaccttggtggattattacctggaaaccagctctcagccggcattgcacatcctgaccaccttgcaagagccacatgacaagcacctcttggacaggattaacgaatatgtgggcaaagccgccactcgtttatccatcctctcgttactgggtcatgtcataagactgcagccatcttggaagcataagctctctcaagcacctcttttgccttctttactaaaatgtctcaagatggacactgacgtcgttgtcctcacaacaggcgtcttggtgttgataaccatgctaccaatgattccacagtctgggaaacagcatcttcttgatttctttgacatttttggccgtctgtcatcatggtgcctgaagaaaccaggccacgtggcggaagtctatctcgtccatctccatgccagtgtgtacgcactctttcatcgcctttatggaatgtacccttgcaacttcgtctcctttttgcgttctcattacagtatgaaagaaaacctggagacttttgaagaagtggtcaagccaatgatggagcatgtgcgaattcatccggaattagtgactggatccaaggaccatgaactggaccctcgaaggtggaagagattagaaactcatgatgttgtgatcgagtgtgccaaaatctctctggatcccacagaagcctcatatgaagatggctattctgtgtctcaccaaatctcagcccgctttcctcatcgttcagccgatgtcaccaccagcccttatgctgacacacagaatagctatgggtgtgctacttctaccccttactccacgtctcggctgatgttgttaaatatgccagggcagctacctcagactctgagttccccatcgacacggctgataactgaaccaccacaagctactctttggagcccatctatggtttgtggtatgaccactcctccaacttctcctggaaatgtcccacctgatctgtcacacccttacagtaaagtctttggtacaactgcaggtggaaaaggaactcctctgggaaccccagcaacctctcctcctccagccccactctgtcattcggatgactacgtgcacatttcactcccccaggccacagtcacaccccccaggaaggaagagagaatggattctgcaagaccatgtctacacagacaacaccatcttctgaatgacagaggatcagaagagccacctggcagcaaaggttctgtcactctaagtgatcttccagggtttttaggtgatctggcctctgaagaagatagtattgaaaaagataaagaagaagctgcaatatctagagaactttctgagatcaccacagcagaggcagagcctgtggttcctcgaggaggctttgactctcccttttaccgagacagtctcccaggttctcagcggaagacccactcggcagcctccagttctcagggcgccagcgtgaaccctgagcctttacactcctccctggacaagcttgggcctgacacaccaaagcaagcctttactcccatagacctgccctgcggcagtgctgatgaaagccctgcgggagacagggaatgccagacttctttggagaccagtatcttcactcccagtccttgtaaaattccacctccgacgagagtgggctttggaagcgggcagcctcccccgtatgatcatctttttgaggtggcattgccaaagacagcccatcattttgtcatcaggaagactgaggagctgttaaagaaagcaaaaggaaacacagaggaagatggtgtgccctctacctccccaatggaagtgctggacagactgatacagcagggagcagacgcgcacagcaaggagctgaacaagttgcctttacccagcaagtctgtcgactggacccactttggaggctctcctccttcagatgagatccgcaccctccgagaccagttgcttttactgcacaaccagttactctatgagcgttttaagaggcagcagcatgccctccggaacaggcggctcctccgcaaggtgatcaaagcagcagctctggaggaacataatgctgccatgaaagatcagttgaagttacaagagaaggacatccagatgtggaaggttagtctgcagaaagaacaagctagatacaatcagctccaggagcagcgtgacactatggtaaccaagctccacagccagatcagacagctgcagcatgaccgagaggaattctacaaccagagccaggaattacagacgaagctggaggactgcaggaacatgattgcggagctgcggatagaactgaagaaggccaacaacaaggtgtgtcacactgagctgctgctcagtcaggtttcccaaaagctctcaaacagtgagtcggtccagcagcagatggagttcttgaacaggcagctgttggttcttggggaggtcaacgagctctatttggaacaactgcagaacaagcactcagataccacaaaggaagtagaaatgatgaaagccgcctatcggaaagagctagaaaaaaacagaagccatgttctccagcagactcagaggcttgatacctcccaaaaacggattttggaactggaatctcacctggccaagaaagaccaccttcttttggaacagaagaaatatctagaggatgtcaaactccaggcaagaggacagctgcaggccgcagagagcaggtatgaggctcagaaaaggataacccaggtgtttgaattggagatcttagatttatatggcaggttggagaaagatggcctcctgaaaaaacttgaagaagaaaaagcagaagcagctgaagcagcagaagaaaggcttgactgttgtaatgacgggtgctcagattccatggtagggcacaatgaagaggcatctggccacaacggtgagaccaagacccccaggcccagcagcgcccggggcagtagtggaagcagaggtggtggaggcagcagcagcagcagcagcgagctttctaccccagagaaacccccacaccagagggcaggcccattcagcagtcggtgggagacgactatgggagaagcgtctgccagcatccccaccactgtgggctcacttcccagttcaaaaagcttcctgggtatgaaggctcgagagttatttcgtaataagagcgagagccagtgtgatgaggacggcatgaccagtagcctttctgagagcctaaagacagaactgggcaaagacttgggtgtggaagccaagattcccctgaacctagatggccctcacccgtctcccccgaccccggacagtgttggacagctacatatcatggactacaatgagactcatcatgaacacagctaaggaatgatggtcaatcagtgttaacttgcatattgttggcacagaacaggaggtgtgaatgcacgtttcaaagctttcctgtttccagggtctgagtgcaagttcatgtgtggaaatgggacggaggtcctttggacagctgactgaatgcagaacggtttttggatctggcattgaaatgcctcttgaccttcccctccacccgccctaaccccctctcatttacctcgcagtgtgttctaatccaagggccagttggtgttcctcagtagctttactttcttcctttcccccccaaatggttgcgtcctttgaacctgtgcaatatgaggccaaatttaatctttgagtctaacacaccactttctgctttcccgaagttcagataactgggttggctctcaattagaccaggtagtttgttgcattgcaggtaagtctggttttgtcccttccaggaggacatagcctgcaaagctggttgtctttacatgaaagcgtttacatgagactttccgactgcttttttgattctgaagttcagcatctaaagcagcaggtctagaagaacaacggtttattcatacttgcattcttttggcagttctgataagcttcctagaaagttctgtgtaaacagaagcctgtttcagaaatctggagctggcactgtggagaccacacaccctttgggaaagctcttgtctcttcttcccccactacctcttatttatttggtgtttgcttgaatgctggtactattgtgaccacaggctggtgtgtaggtggtaaaacctgttctccataggagggaaggagcagtcactgggagaggttacccgagaagcacttgagcatgaggaactgcacctttaggccatctcagcttgctgggccttttgttaaacccttctgtctactggcctccctttgtgtgcatacgcctcttgttcatgtcagcttatatgtgacactgcagcagaaaggctctgaaggtccaaagagtttctgcaaagtgtatgtgaccatcatttcccaggccattagggttgcctcactgtagcaggttctaggctaccagaagaggggcagctttttcataccaattccaactttcaggggctgactctccagggagctgatgtcatcacactctccatgttagtaatggcagagcagtctaaacagagtccgggagaatgctggcaaaggctggctgtgtatacccactaggctgccccacgtgctcccgagagatgacactagtcagaaaattggcagtggcagagaatccaaactcaacaagtgctcctgaaagaaacgctagaagcctaagaactgtggtctggtgttccagctgaggcagggggatttggtaggaaggagccagtgaacttggctttcctgtttctatctttcattaaaaagaatagaaggattcagtcataaagaggtaaaaaactgtcacggtacgaaatcttagtgcccacggaggcctcgagcagagagaatgaaagtcttttttttttttttttttttttagcatggcaataaatattctagcatccctaactaaaggggactagacagttagagactctgtcaccctagctataccagcagaaaacctgttcaggcaggctttctgggtgtgactgattcccagcctgtggcagggcgtggtcccaactactcagcctagcacaggctggcagttggtactgaattgtcagatgtggagtattagtgacaccacacatttaattcagctttgtccaaaggaaagcttaaaacccaatacagtctagtttcctggttccgttttagaaaaggaaaacgtgaacaaacttagaaagggaaggaaatcccatcagtgaatcctgaaactggttttaagtgctttccttctcctcatgcccaagagatctgtgccatagaacaagataccaggcacttaaagccttttcctgaattggaaaggaaaagaggcccaagtgcaaaagaaaaaacattttagaaacggacagcttataaaaataaagggaagaaaggaggcagcatggagagaggcctgtgctagaagctccatggacgtgtctgcacagggtcctcagctcatccatgcggcctgggtgtccttttactcagctttataacaaatgtggctccaagctcaggtgcctttgagttctaggaggctgtgggttttattcaactacggttgggagaatgagacctggagtcatgttgaaggtgcccaacctaaaaatgtaggctttcatgttgcaaagaactccagagtcagtagttaggtttggtttggttttggacatgataaacctgccaagagtcaacaggtcacttgatcatgctgcagtgggtagttctaaggatggaaaggtgacagtattactctcgagaggcaattcagtcctgggcaaaggtattagtacaataagcgttaagggcagagtctaccttgaaaccaattaagcagcttggtattcataaatattgggattggatggcctccatccagaaatcactatgggtgagcatacctgtctcagctgtttggccaatgtgcataacctactcggatccccacctgacactaaccagagtcagcacaggccccgaggagcccgaagtctgctgctgtgcagcatggaattcctttaaaaaggtgcactacagttttagcggggagggggataggaagacgcagagcaaatgagctccggagtccctgcaggtgaataaacacacagatctgcatctgatagaactttgatggattttcaaaaagccgttgacaaggctctgctatacagtctataaaaattgttattatgggattggaagaaacacgtggtcatgaatagaaaaaaaacaaacccaaaggtaggaaggtcaaggtcatttcttagatggagaagttgtgaaagatgtccttggagatgagttttaggaccagcattactaaggcaggtgggcagacagtgacctctctaggtgtgtccacagagtttttcaggagagaaaactgcctgacctttgggactaagctgcggaatcttcttactaagcttgaagagtggagaggcgagaggtgagctactttgtgagccaaagcttatgtgacatggttggggaaacagtccaaactgttctgagaaggtgaactgttacgacccaggacaattagaaaaattcacccaccatgccgcacattactgggtaaaagcagggcagcagggaacaaaactccagactcttgggccgtccccatttgcaacagcacacatagtttctggtatatttgttgggaaagataaaactctagcagttgttgaggggaggatgtataaaatggtcatggggatgaaaggatctctgagaccacagaggctcagactcactgttaagaatagaaaactgggtatgcgtttcatgtagccagcagaactgaagtgtgctgtgacaagccaatgtgaatttctaccaaatagtagagcataccacttgaagaaggaaagaaccgaagagcaaacaaaagttctgcgtaatgagactcaccttttctcgctgaaagcactaagaggtgggaggaggcctgcacaggctggaggagggtttgggcagagcgaagacccggccaggaccttggtgagatggggtgccgcccacctcctgcggatactcttggagagttgttcccccagggggctctgccccacctggagaaggaagctgcctggtgtggagtgactcaaatcagtatacctatctgctgcaccttcactctccagggtacatgctttaaaaccgacccgcaacaagtattggaaaaatgtatccagtctgaagatgtttgtgtatctgtttacatccagagttctgtgacacatgccccccagattgctgcaaagatcccaaggcattgattgcacttgattaagcttttgtctgtaggtgaaagaacaagtttaggtcgaggactggcccctaggctgctgctgtgacccttgtcccatgtggcttgtttgcctgtccgggactcttcgatgtgcccaggggagcgtgttcctgtctcttccatgccgtcctgcagtccttatctgctcgcctgagggaagagtagctgtagctacaagggaagcctgcctggaagagccgagcacctgtgcccatggcttctggtcatgaaacgagttaatgatggcagaggagcttcctccccacttcgcagcgccacattatccatcctctgagataagtaggctggtttaaccattggaatggacctttcagtggaaaccctgagagtctgagaacccccagaccaacccttccctccctttccccacctcttacagtgtttggacaggagggtatggtgctgctctgtgtagcaagtactttggcttatgaaagaggcagccacgcattttgcactaggaagaatcagtaatcacttttcagaagacttctatggaccacaaatatattacggaggaacagattttgctaagacataatctagttttataactcaatcatgaatgaaccatgtgtggcaaacttgcagtttaaaggggtcccatcagtgaaagaaactgattttttttaacggactgcttttagttaaattgaagaaagtcagctcttgtcaaaaggtctaaactttcccgcctcaatcctaaaagcatgtcaacaatccacatcagatgccataaatatgaactgcaggataaaatggtacaatcttagtgaatgggaattggaatcaaaagagtttgctgtccttcttagaatgttctaaaatgtcaaggcagttgcttgtgtttaactgtgaacaaataaaaatttattgttttgcactaaa

SEQ ID NO: 778 - protein, 1164 aa, Homo sapiens
MAQQANVGELLAMLDSPMLGVRDDVTAVFKENLNSDRGPMLVNTLVDYYLETSSQPALHILTTLQEPHDKHLLDRINEYVGKAATRLSILSLLGHVIRLQPSWKHKLSQAPLLPSLLKCLKMDTDVVVLTTGVLVLITMLPMIPQSGKQHLLDFFDIFGRLSSWCLKKPGHVAEVYLVHLHASVYALFHRLYGMYPCNFVSFLRSHYSMKENLETFEEVVKPMMEHVRIHPELVTGSKDHELDPRRWKRLETHDVVIECAKISLDPTEASYEDGYSVSHQISARFPHRSADVTTSPYADTQNSYGCATSTPYSTSRLMLLNMPGQLPQTLSSPSTRLITEPPQATLWSPSMVCGMTTPPTSPGNVPPDLSHPYSKVFGTTAGGKGTPLGTPATSPPPAPLCHSDDYVHISLPQATVTPPRKEERMDSARPCLHRQHHLLNDRGSEEPPGSKGSVTLSDLPGFLGDLASEEDSIEKDKEEAAISRELSEITTAEAEPVVPRGGFDSPFYRDSLPGSQRKTHSAASSSQGASVNPEPLHSSLDKLGPDTPKQAFTPIDLPCGSADESPAGDRECQTSLETSIFTPSPCKIPPPTRVGFGSGQPPPYDHLFEVALPKTAHHFVIRKTEELLKKAKGNTEEDGVPSTSPMEVLDRLIQQGADAHSKELNKLPLPSKSVDWTHFGGSPPSDEIRTLRDQLLLLHNQLLYERFKRQQHALRNRRLLRKVIKAAALEEHNAAMKDQLKLQEKDIQMWKVSLQKEQARYNQLQEQRDTMVTKLHSQIRQLQHDREEFYNQSQELQTKLEDCRNMIAELRIELKKANNKVCHTELLLSQVSQKLSNSESVQQQMEFLNRQLLVLGEVNELYLEQLQNKHSDTTKEVEMMKAAYRKELEKNRSHVLQQTQRLDTSQKRILELESHLAKKDHLLLEQKKYLEDVKLQARGQLQAAESRYEAQKRITQVFELEILDLYGRLEKDGLLKKLEEEKAEAAEAAEERLDCCNDGCSDSMVGHNEEASGHNGETKTPRPSSARGSSGSRGGGGSSSSSSELSTPEKPPHQRAGPFSSRWETTMGEASASIPTTVGSLPSSKSFLGMKARELFRNKSESQCDEDGMTSSLSESLKTELGKDLGVEAKIPLNLDGPHPSPPTPDSVGQLHIMDYNETHHEHS

SEQ ID NO: 779 - DNA, 1998 bp, Homo sapiens
  CDS (83)..(1177)
cccactggccggtataaagcaccgtgaccctcaggtgacgcaccagggccggctgccgtcggggacagggctttccatagccatggcccagcagtggagcctccaaaggctcgcaggccgccatccgcaggacagctatgaggacagcacccagtccagcatcttcacctacaccaacagcaactccaccagaggccccttcgaaggcccgaattaccacatcgctcccagatgggtgtaccacctcaccagtgtctggatgatctttgtggtcattgcatccgtcttcacaaatgggcttgtgctggcggccaccatgaagttcaagaagctgcgccacccgctgaactggatcctggtgaacctggcggtcgctgacctggcagagaccgtcatcgccagcactatcagcgttgtgaaccaggtctatggctacttcgtgctgggccaccctatgtgtgtcctggagggctacaccgtctccctgtgtgggatcacaggtctctggtctctggccatcatttcctgggagagatggatggtggtctgcaagccctttggcaatgtgagatttgatgccaagctggccatcgtgggcattgccttctcctggatctgggctgctgtgtggacagccccgcccatctttggttggagcaggtactggccccacggcctgaagacttcatgcggcccagacgtgttcagcggcagctcgtaccccggggtgcagtcttacatgattgtcctcatggtcacctgctgcatcaccccactcagcatcatcgtgctctgctacctccaagtgtggctggccatccgagcggtggcaaagcagcagaaagagtctgaatccacccagaaggcagagaaggaagtgacgcgcatggtggtggtgatggtcctggcattctgcttctgctggggaccatacgccttcttcgcatgctttgctgctgccaaccctggctaccccttccaccctttgatggctgccctgccggccttctttgccaaaagtgccactatctacaaccccgttatctatgtctttatgaaccggcagtttcgaaactgcatcttgcagcttttcgggaagaaggttgacgatggctctgaactctccagcgcctccaaaacggaggtctcatctgtgtcctcggtatcgcctgcatgaggtctgcctcctacccatcccgcccaccggggctttggccacctctcctttccccctccttctccatccctgtaaaataaatgtaatttatctttgccaaaaccaacaaagtcacagaggctttcactgcagtgtgggaccacctgagcctctgcgtgtgcaggcactgggtctcgagagggtgcaagggggataaagaggagagagcgcttcatagactttaagttttcccgagcctcatgtctaccgatggcgtgaaaggatcctggcaaaacagaagtgtgaggcaggtgggcgtctatatccatttcaccaggctggtggttacataatcggcaagcaagagctgtggaggggcttgctggatgccctcagcacccaggaggagggagggagctagcaagctaaggcaggtggccctcctggccccttaaggtccatctgctggaggcccagagtccttggagtacagtctacacctggaggggacccattcctgccagtctgtggcagggatggcgcgccacctctgccaggccaggaccccaagcccgatcagcatcagcatggtgcaggtgcacaggcgtgagctgatcagtgacgaggggcaggcacacaaggtggagacaaagaccaagaggacggttgccagtgagaggcgcggactcaggaacttgaacaacatctgcgggggacggctttggaggtgctccgctgcctccagttgggtgacttgctgtagcatctccagcttggatattcggctcttgaaggtctccgtgatctcctgcaggagacgaaaatgcacgcaccagaagtca

SEQ ID NO: 780 - protein, 364 aa, Homo sapiens
MAQQWSLQRLAGRHPQDSYEDSTQSSIFTYTNSNSTRGPFEGPNYHIAPRWVYHLTSVWMIFVVIASVFTNGLVLAATMKFKKLRHPLNWILVNLAVADLAETVIASTISVVNQVYGYFVLGHPMCVLEGYTVSLCGITGLWSLAIISWERWMVVCKPFGNVRFDAKLAIVGIAFSWIWAAVWTAPPIFGWSRYWPHGLKTSCGPDVFSGSSYPGVQSYMIVLMVTCCITPLSIIVLCYLQVWLAIRAVAKQQKESESTQKAEKEVTRMVVVMVLAFCFCWGPYAFFACFAAANPGYPFHPLMAALPAFFAKSATIYNPVIYVFMNRQFRNCILQLFGKKVDDGSELSSASKTEVSSVSSVSPA

SEQ ID NO: 781 - DNA, 2546 bp, Homo sapiens
  CDS (799)..(2019)
cagcggcggcccaggaggcagccggtgagcgcctgcgagcagagtggcgggggccgctgacaggtcccgcgcagcccagcccagcccagccacgcggctcacaggtggggtccaagagcagtttggagcaacccggcgctacggagaggggtggacggctctgcacgggcctcctgtctcccgctcgggcagagggactcggggggacctcgctccttggccgagagaacctgaactcgggcggagagaacgcgcccaggcgggcaaggggaccagagaaagccggggctggaagtcactgtcgctcgccactgtctggagcgcacggagcgcagaggcccggcagccgcgcgtgccctcccggggaccgagccagtgatgcaggatcgctgagcggagatccgcgccgagaagtctctcggggccggggctgagacgcacgccttcgacaccgctgccaagaccccgattccggcgactcttgcggggaaccgaggggccaaggctgccccaagctcaggacttgggcgagtctaagacgatggtttcttaagcacggacccgcgttccccttcccgccccctcgactggaggcagggatcctgcgcggggcccccgggattccgtttccccgcggagccccggccgctgcctcccgggacagttcgcacggccacaggggcgcacggcgatgtggcctccgtccagcgcgctggcccgccggggggatgctctggcacctgtcggggtccaggcctagcatggccggcgcgttgcccgacgtcgcctccggctaggatggcccctccgggcccggccagtgccctctccacctcggccgagccgctgtcccgcagcatcttccggaagttcttgctgatgctctgctccctgctcacgtccctttacgtcttctactgcctggccgagcgctgccagaccctgtccggccccgtcgtggggctgtccggcggcggcgaggaggcgggggcccctggtggcggcgtcctggccggaggcccgagggagctggcggtgtggccggcggcggcacagagaaagcgcctcctgcaactgccgcagtggcggaggcgccggccgcccgcgccccgcgacgacggcgaggaggcggcctgggaagaagagtcccctggcctgtcagggggtccgggcggctccggggccggaagcaccgtggccgaggccccgccggggaccctggcgctgctcctggacgaaggcagcaagcagctgccgcaggccatcatcatcggagtgaagaagggcggcacgcgggcgctgctggagttcctgcgcgtgcaccccgacgtgcgcgccgtgggcgccgagccccacttcttcgaccgcagctacgacaagggcctcgcctggtaccgggacctgatgcccagaaccctggacgggcagatcaccatggagaagacgcccagttacttcgtcacgcgggaggcccccgcgcgcatctcggccatgtccaaggacaccaagctcatcgtggtggtgcgggacccggtgaccagggccatctcggactacacgcagacgctgtccaagcggcccgacatccccaccttcgagagcttgacgttcaaaaacaggacagcgggcctcatcgacacgtcgtggagcgccatccagatcggcatctacgccaagcacctggagcactggctgcgccacttccccatccgccagatgctcttcgtgagcggcgagcggctcatcagcgacccggccggggagctgggccgcgtgcaagacttcctgggcctcaagaggatcatcacggacaagcacttctacttcaacaagaccaagggcttcccctgcctgaagaaggcggagggcagcagccggccccattgcctgggcaagaccaagggcaggacccatcctgagatcgaccgcgaggtggtgcgcaggctgcgcgagttctaccggcctttcaacctcaagttctaccagatgaccgggcacgactttggctgggatggataaccatataatttaaaaagaaaaaaaaaatcaaaatataatatatttttttaccaatcggtagagaagagacagtttaatatttgtgctgaaaatatgtttcagtatttttttcaatgaatgttaagagattgttctcactcccgccccatcttaatgtataaccaacaccaaacacgtggatcaacagaaaaggaaaatttcactcgtctaaacactttcaattttcagtttttattttatgttctatatacccagtcataaagtataagcatcagttgtcattaaaagttttcagaaaatcttgaggttaaacatctctctctctttttttaaaatacaaggccctgataaaattgatatctatccttatatttttctccctttttcccgtgccactttttcttaaattatttcccagttagtattatcatatgtttgtacccgtcacagttttcatagtgctttcaaatacacctttttgatcattaaaataaaaaaataaatcttggaaaaaaaaaaaaaaaaaa

SEQ ID NO: 782 - protein, 406 aa, Homo sapiens
MAPPGPASALSTSAEPLSRSIFRKFLLMLCSLLTSLYVFYCLAERCQTLSGPVVGLSGGGEEAGAPGGGVLAGGPRELAVWPAAAQRKRLLQLPQWRRRRPPAPRDDGEEAAWEEESPGLSGGPGGSGAGSTVAEAPPGTLALLLDEGSKQLPQAIIIGVKKGGTRALLEFLRVHPDVRAVGAEPHFFDRSYDKGLAWYRDLMPRTLDGQITMEKTPSYFVTREAPARISAMSKDTKLIVVVRDPVTRAISDYTQTLSKRPDIPTFESLTFKNRTAGLIDTSWSAIQIGIYAKHLEHWLRHFPIRQMLFVSGERLISDPAGELGRVQDFLGLKRIITDKHFYFNKTKGFPCLKKAEGSSRPHCLGKTKGRTHPEIDREVVRRLREFYRPFNLKFYQMTGHDFGWDG

SEQ ID NO: 783 - DNA, 7445 bp, Homo sapiens
  CDS (411)..(4997)
gggcctggttgtggaggccccttttgcaaaacctcagtctgaatttagtagacagaagtcactaggaatgccttgacaggatcctgccttagctaaggctccctccagctgcagagggtgtttttgttagactcacacactgcgtgaaactgctcagaatagagccatgatctcaaccacgaaatgggaacttagattttggagaaactaacggggacggacttctttcctagcctgagtgttgagcagtgtcatgccttggcgtttcagctcctcgttgtctaggtggtgaaatgacagaactcattcgcttctttgattggtgattttgaaataatctttcatcaagttccatctcctttaccctcatatggaatatatctctctgtctgttgttaaactacgatgacatgtctgtagctatcagaaagagaagctgggaagaacatgtgacccactggatgggacagccttttaattctgatgatcgtaacacagcatgtcatcatggactagtagctgacagcttgcaggcaagtatggaaaaagatgcaactctaaatgtggaccgcaaagagaagtgtgtttcactacctgactgctgtcatggatcagagctgagagattttcctgggaggccaatgggtcatctttcaaaggatgtggacgaaaatgacagccatgaaggtgaagatcagtttctttctctggaagccagcacagaaacactagtgcatgtttctgatgaggataacaatgctgatttatgccttacagatgataaacaggttttaaatacccaagggcagaaaacatcaggccaacatatgatccaaggagcaggctccttagaaaaggcactgcccatcatacaaagtaaccaagtttcttctaactcctggggaatagctggtgaaactgaattagcactggtaaaagaaagtggggagagaaaagttactgactctataagtaaaagcctggagctttgcaatgaaataagcttaagtgaaataaaagatgcacccaaagtaaatgcagtggatactttgaacgtgaaagatattgcacctgagaaacaattgcttaactctgctgtaattgctcagcaacgaaggaaacctgacccccctaaagatgaaaatgaaagaagcacctgcaatgtagtacaagatgagttcttggatactccttgcacaaacagaggactgccattattaaaaacagattttggaagctgccttctgcagcctccttcctgccccaatggaatgtcagctgaaaatggcctggagaagagtggtttttcacaacatcaaaacaaaagtccaccaaaggtcaaggcagaagatggcatgcagtgtttacaattaaaggagaccctggccacccaggaacccacagataaccaagtcagacttcgtaagagaaaggaaataagagaagatcgagatagggcgcggctggactccatggtgctgctgattatgaaactggaccagcttgatcaggacatagaaaatgccctcagcaccagctcctctccatcaggcacaccaacaaacctgcggcggcacgttcctgatctggaatcaggatctgaaagtggagcagataccatttcagtaaatcagacacgagtaaatttgtcttctgacactgagtccacggacctcccatcttccactccagtagccaattctggaaccaaacccaagactacggctattcaaggtatttcagagaaggaaaaggctgaaattgaagccaaggaagcttgtgattggctacgggcaactggtttcccccagtatgcacagctttatgaagatttcctgttccccatcgatatttccttggtcaagagagagcatgattttttggacagagatgccattgaggctctatgcaggcgtctaaatactttaaacaaatgtgcggtgatgaagctagaaattagtcctcatcggaaacgaagtgacgattcagacgaggatgagccttgtgccatcagtggcaaatggactttccaaagggacagcaagaggtggtcccggcttgaagagtttgatgtcttttctccaaaacaagacctggtccctgggtccccagacgactcccacccgaaggacggccccagccccggaggcacgctgatggacctcagcgagcgccaggaggtgtcttccgtccgcagcctcagcagcactggcagcctccccagccacgcgccccccagcgaggatgctgccaccccccggactaactccgtcatcagcgtttgctcctccagcaacttggcaggcaatgacgactctttcggcagcctgccctctcccaaggaactgtccagcttcagcttcagcatgaaaggccacgaaaaaactgccaagtccaagacgcgcagtctgctgaaacggatggagagcctgaagctcaagagctcccatcacagcaagcacaaagcgccctcaaagctggggttgatcatcagcgggcccatcttgcaagaggggatggatgaggagaagctgaagcagctcaactgcgtggagatctccgccctcaatggcaaccgcatcaacgtccccatggtacgaaagaggagcgtttccaactccacgcagaccagcagcagcagcagccagtcggagaccagcagcgcggtcagcacgcccagccctgttacgaggacccggagcctcagtgcgtgcaacaagcgggtgggcatgtacttagagggcttcgatcctttcaatcagtcaacatttaacaacgtggtggagcagaactttaagaaccgcgagagctacccagaggacacggtgttctacatccctgaagatcacaagcctggcactttccccaaagctctcaccaatggcagtttctccccctcggggaataacggctctgtgaactggaggacgggaagcttccacggccctggccacatcagcctcaggagggaaaacagtagcgacagccccaaggaactgaagagacgcaattcttccagctccatgagcagccgcctgagcatctacgacaacgtgccgggctccatcctctactccagttcaggggacctggcggatctggagaacgaggacatcttccccgagctggacgacatcctctaccacgtgaaggggatgcagcggatagtcaatcagtggtcggagaagttttctgatgagggagattcggactcagccctggactcggtctctccctgcccgtcctctccaaaacagatacacctggatgtggacaacgaccgaaccacacccagcgacctggacagcacaggcaactccctgaatgaaccggaagagccctccgagatcccggaaagaagggattctggggttggggcttccctaaccaggtccaacaggcaccgactgagatggcacagtttccagagctcacatcggccaagcctcaactctgtatcactacagattaactgccagtctgtggcccagatgaacctgctgcagaaatactcactcctaaagctaacggccctgctggagaaatacacaccttctaacaagcatggttttagctgggccgtgcccaagttcatgaagaggatcaaggttccagactacaaggaccggagtgtgtttggggtcccactgacggtcaacgtgcagcgcacaggacaaccgttgcctcagagcatccagcaggccatgcgatacctccggaaccattgtttggatcaggttgggctcttcagaaaatcgggggtcaagtcccggattcaggctctgcgccagatgaatgaaggtgccatagactgtgtcaactacgaaggacagtctgcttatgacgtggcagacatgctgaagcagtattttcgagatcttcctgagccactaatgacgaacaaactctcggaaacctttctacagatctaccaatatgtgcccaaggaccagcgcctgcaggccatcaaggctgccatcatgctgctgcctgacgagaaccgggaggttctgcagaccctgctttatttcctgagcgatgtcacagcagccgtaaaagaaaaccagatgaccccaaccaacctggccgtgtgcttagcgccttccctcttccatctcaacaccctgaagagagagaattcctctcccagggtaatgcaaagaaaacaaagtttgggcaaaccagatcagaaagatttgaatgaaaacctagctgccactcaagggctggcccatatgatcgccgagtgcaagaagcttttccaggttcccgaggaaatgagccgatgtcgtaattcctataccgaacaagagctgaagcccctcactctggaagcactcgggcacctgggtaatgatgactcagctgactaccaacacttcctccaggactgtgtggatggcctgtttaaagaagtcaaagagaagtttaaaggctgggtcagctactccacttcggagcaggctgagctgtcctataagaaggtgagcgaaggaccccctctgaggctttggaggtcagtcattgaagtccctgctgtgccagaggaaatcttaaagcgcctacttaaagaacagcacctctgggatgtagacctgttggattcaaaagtgatcgaaattctggacagccaaactgaaatttaccagtatgtccaaaacagtatggcacctcatcctgctcgagactacgttgttttaagaacctggaggactaatttacccaaaggagcctgtgcccttttactaacctctgtggatcacgatcgcgcacctgtggtgggtgtgagggttaatgtgctcttgtccaggtatttgattgaaccctgtgggccaggaaaatccaaactcacctacatgtgcagagttgacttaaggggccacatgccagaatggtacacaaaatcttttggacatttgtgtgcagctgaagttgtaaagatccgggattccttcagtaaccagaacactgaaaccaaagacaccaaatctaggtgatcactgaagcaacgcaaccgcttccaccaccatggtgtttgtttctagaacttttgccagtccttgaagaatgggttctgtgtctaatcctgaaacaaagaaaactacaagctggagtgtaggaattgactatagcaatttgatacatttttaaagctgcttcctgtttgttgagggtctgtattcatagaccttgactggaatatgtaagactgtgcaaaaaaaaaaaaaaaatttatgtgtattcttattcagattgcttctgagaagcaaaactctttaaatacattatggaagataatgaagatacttcattctcttgtgatatcagtgtatgcgtacctgtgtcgctttatttgcagtgtgttgagggactggtgtatccactggaatagttggtactcttggatgtgttttctcaccaagatgagcaaagaaaggtttgcacagaggagtgtgaatgtgtgtttgttgctggctgaatggcaatagatgtctaaggtggattcagtgtctggcacactgagacacctccaagaaggagattgatgcatcaggttcagtttaacctggaatatctgactacccctgaatccacccagaaagggggcccaacacccttgtccatttatgggtattttttttcgaagttattaagcatattccttttccacgaacctcttctgtactttgattgtaataggttggctcttacacccattccaaatgcagtttatttttagacccgattgcaaatagtgatgtagttttaaccagtatggattagttcagggatgaactgctccctctagccttactggctctgatccacagggttttgttttgttttgttttgttttttgtttaagtcgagatataaaaactgaacacgataacacttactcttaaatcaagcatcaacactttttccctgttagaattctttgcatttttgtgtttgtaacagaaacgccttaagacactatgtttgggaatataggaaactatgtgtgtcccaaggaaatccctgtaaatttaactcacctacaaaaggctttttccccgcctttggttgttaacggcattcctgaaagccacatgtgtttattcattgggcttgttcttatcagcaaataggttttctggttttatgactttttgtcttattttatttttcctacatttctttttttttttttttcctttagaatgccctggaaatatatttaagtggtaatgaaaaatagtaatcatagtaaaacgcaacaagaagaaaaccaacccaaaccagtgaagttttttagaacctttagaagggtggtctttattcaggttttactgtaatggtaaggattgactcaagagacagtattagtaaatttattgtgtatggatcaaaagtgaataatgtatgaatgagagctgtaagaaggatttttattttgttataatttagttaccattttcagtgttatttcaaaggttctttgaagaattttggggcagggcatcagattagagttttaaaatttgagtattttggatatcagtgttcctcatgaagatatacatggatattcaattttgatggcttccagatttgtaagattgtatgttgtatataccattctattaagaaacatgtccactgtgctttcaaacatagataaagcatgataaagattattatttaagatatacttgtatttatacctcagatattcttttgggttttgtacctcaaggcttttttcttcttattgtaaatacactttacgtgaatacagtctaagtgaagaaaataaataaaaggaagaggtttataacttgctctatatctgtacagattataatcaataagtgcactattattaaatgtttaaagtaagggaaaagtctgggctgccttccttaatattgcatctcactcccacccttaaaaccacagattgcaaagcatagcattttagcatcaactacaatcaaaagagcgatttgctgaaggaaaaatcggactgcaaatcattccaaggccaaactgcaactgagccacccactcccaaacaggaaaccctggtgaaggttcaggaagcacggagattctctccaacaaaggtccagttaggaaacgacgctgagaggatgacgacaacgtgcaacagcagaaagatgcttgcaagcagagtcagggtcaccagtgaatgccacaaaagttctctttcccactgtttaatttgacaagagaagaatttgaaggatatgaacattttcaagaactctgctgaggtcacttagagcgccatcacaacttatttgtgtgactaattgcctagattgtaagctctttgagggcagggcttgtctcttacacatctttataatcccctgcagcggctttcagtattttgtacttgtaggcacctaataaatttattatttgctatactg

SEQ ID NO: 784 - protein, 1528 aa, Homo sapiens
MSVAIRKRSWEEHVTHWMGQPFNSDDRNTACHHGLVADSLQASMEKDATLNVDRKEKCVSLPDCCHGSELRDFPGRPMGHLSKDVDENDSHEGEDQFLSLEASTETLVHVSDEDNNADLCLTDDKQVLNTQGQKTSGQHMIQGAGSLEKALPIIQSNQVSSNSWGIAGETELALVKESGERKVTDSISKSLELCNEISLSEIKDAPKVNAVDTLNVKDIAPEKQLLNSAVIAQQRRKPDPPKDENERSTCNVVQDEFLDTPCTNRGLPLLKTDFGSCLLQPPSCPNGMSAENGLEKSGFSQHQNKSPPKVKAEDGMQCLQLKETLATQEPTDNQVRLRKRKEIREDRDRARLDSMVLLIMKLDQLDQDIENALSTSSSPSGTPTNLRRHVPDLESGSESGADTISVNQTRVNLSSDTESTDLPSSTPVANSGTKPKTTAIQGISEKEKAEIEAKEACDWLRATGFPQYAQLYEDFLFPIDISLVKREHDFLDRDAIEALCRRLNTLNKCAVMKLEISPHRKRSDDSDEDEPCAISGKWTFQRDSKRWSRLEEFDVFSPKQDLVPGSPDDSHPKDGPSPGGTLMDLSERQEVSSVRSLSSTGSLPSHAPPSEDAATPRTNSVISVCSSSNLAGNDDSFGSLPSPKELSSFSFSMKGHEKTAKSKTRSLLKRMESLKLKSSHHSKHKAPSKLGLIISGPILQEGMDEEKLKQLNCVEISALNGNRINVPMVRKRSVSNSTQTSSSSSQSETSSAVSTPSPVTRTRSLSACNKRVGMYLEGFDPFNQSTFNNVVEQNFKNRESYPEDTVFYIPEDHKPGTFPKALTNGSFSPSGNNGSVNWRTGSFHGPGHISLRRENSSDSPKELKRRNSSSSMSSRLSIYDNVPGSILYSSSGDLADLENEDIFPELDDILYHVKGMQRIVNQWSEKFSDEGDSDSALDSVSPCPSSPKQIHLDVDNDRTTPSDLDSTGNSLNEPEEPSEIPERRDSGVGASLTRSNRHRLRWHSFQSSHRPSLNSVSLQINCQSVAQMNLLQKYSLLKLTALLEKYTPSNKHGFSWAVPKFMKRIKVPDYKDRSVFGVPLTVNVQRTGQPLPQSIQQAMRYLRNHCLDQVGLFRKSGVKSRIQALRQMNEGAIDCVNYEGQSAYDVADMLKQYFRDLPEPLMTNKLSETFLQIYQYVPKDQRLQAIKAAIMLLPDENREVLQTLLYFLSDVTAAVKENQMTPTNLAVCLAPSLFHLNTLKRENSSPRVMQRKQSLGKPDQKDLNENLAATQGLAHMIAECKKLFQVPEEMSRCRNSYTEQELKPLTLEALGHLGNDDSADYQHFLQDCVDGLFKEVKEKFKGWVSYSTSEQAELSYKKVSEGPPLRLWRSVIEVPAVPEEILKRLLKEQHLWDVDLLDSKVIEILDSQTEIYQYVQNSMAPHPARDYVVLRTWRTNLPKGACALLLTSVDHDRAPVVGVRVNVLLSRYLIEPCGPGKSKLTYMCRVDLRGHMPEWYTKSFGHLCAAEVVKIRDSFSNQNTETKDTKSR

SEQ ID NO: 785 - DNA, 904 bp, Homo sapiens
  CDS (24)..(560)
agtttgaagaaggctcttacagcatggccgccggtactgcagctgccttagcgtttttgagtcaggagagccgaacgcgggccgggggtgtcgggggcctacgggtcccggccccggtcactatggacagttttttcttcggctgtgagctctccggccacacccgctccttcacctttaaggtagaggaagaggatgatgcggagcacgtgctggcactaaccatgctctgcctcaccgagggagccaaagacgagtgtaatgtggtagaagttgtggcccggaaccatgaccatcaggagatcgcagtccctgtggccaacctcaagctgtcctgccaacccatgctcagtctggatgacttccagctccaaccacctgtaaccttccgcctgaagtcgggctctggccctgtgcggatcactgggcggcaccagattgttacgatgagcaatgatgtttctgaggaggagagcgaggaagaggaagaggacagtgatgaggaagaagttgagctgtgccccatccttcctgccaaaaagcaggggggcaggccctagccctcctaggtcagctccatgtgccatgcaccgccatgcaccctgttccctgacaagtttcaacaattgtaaatatttcttccttgaagaggagagcttgggtgggggttgggtgggagggacttgggtctttggtgctaggagagggcctgtgctccacacagccgtggttttctgattttcaccatgcccggggcctcccttcccacctgcctgtgagaattggaggttagtgcctgaagctcagagctacacatttttaatagtttttacatttttggataaaggttgaaataaagtggtgtggagtttttgcaaaaaaaaaaaaaaaaaaaaaaaaaaaa

SEQ ID NO: 786 - protein, 178 aa, Homo sapiens
MAAGTAAALAFLSQESRTRAGGVGGLRVPAPVTMDSFFFGCELSGHTRSFTFKVEEEDDAEHVLALTMLCLTEGAKDECNVVEVVARNHDHQEIAVPVANLKLSCQPMLSLDDFQLQPPVTFRLKSGSGPVRITGRHQIVTMSNDVSEEESEEEEEDSDEEEVELCPILPAKKQGGRP

SEQ ID NO: 787 - DNA, 469 bp, Homo sapiens
  CDS (60)..(392)
agccctccaggacaggctgcatcagaagaggccatcaagcagatcactgtccttctgccatggccctgtggatgcgcctcctgcccctgctggcgctgctggccctctggggacctgacccagccgcagcctttgtgaaccaacacctgtgcggctcacacctggtggaagctctctacctagtgtgcggggaacgaggcttcttctacacacccaagacccgccgggaggcagaggacctgcaggtggggcaggtggagctgggcgggggccctggtgcaggcagcctgcagcccttggccctggaggggtccctgcagaagcgtggcattgtggaacaatgctgtaccagcatctgctccctctaccagctggagaactactgcaactagacgcagcccgcaggcagccccacacccgccgcctcctgcaccgagagagatggaataaagcccttgaaccagcaaaa

SEQ ID NO: 788 - protein, 110 aa, Homo sapiens
MALWMRLLPLLALLALWGPDPAAAFVNQHLCGSHLVEALYLVCGERGFFYTPKTRREAEDLQVGQVELGGGPGAGSLQPLALEGSLQKRGIVEQCCTSICSLYQLENYCN

SEQ ID NO: 789 - DNA, 5730 bp, Homo sapiens
  CDS (499)..(1890)
cctccgcctccactcgccctcgtgctcccttcagccccttcgcagctccgtgcgcaaggtcgtgtcccggaagtgaaggggccatgttgatgggtgacccggggagaggtacccggccagaggcgagtcctgcggagtggtagcgcgcacggcctgcggtgtgacacccagcccctgccagtcccccatggccccgtggagccgagaggcggtgctgagtctctatcgggctctgttgcgccagggccgacagcttcgctacactgatcgagacttctactttgcctccatccgccgtgaattccgaaaaaatcagaagctagaggacgctgaggcccgggagaggcagctggagaagggcctggtctttctcaacggcaaattggggaggatcatttaggatcctccaagggaaagaggacaaaggtgccttctgtagacactcctgctctcttccatccccatcttacagatgtattaagaagcctcagatgagcaatggcaggcgctggtgagcgcaaaggcaagaaggatgacaatggcattggcacggccattgactttgtgctctccaatgcccggctggtgctgggggtgggtggagcggccatgctgggcatcgccacgctggcagttaagcggatgtacgatcgggcgatcagtgcccctaccagccccacccgcctgagccattcggggaaaaggagctgggaagaacccaactggatgggctccccacgactgctgaacagggacatgaagacgggcctgagccggtccttgcagacccttcccacagactcctccaccttcgacacagatacattctgcccgccccggcccaagccagtggccaggaagggccaggtagacttgaagaagtcacgactccgcatgtccctgcaggagaaacttcttacttactaccggaaccgggcagccatccctgctggagagcaggctcgggccaagcaagctgctgtggacatatgtgccgagctccggagcttcctgcgggccaagttgcctgacatgccgcttcgggacatgtacttgagtggcagcctctacgatgacctgcaggtggtgacagctgaccacatccaactcattgtgccccttgtgctggagcagaacctgtggtcatgtattcctggtgaagacaccatcatgaatgtccctggcttcttcctggtgcgtcgtgagaatccagagtactttcctcgtgggagcagttactgggaccgctgtgtagtagggggctacctctctccaaagacagtcgcagatacatttgagaaggtagtggctggctccatcaattggccagccatagggtccctcttggactatgtgatccgcccggccccacccccagaagccctcacactggaggtgcagtatgagcgtgacaaacatctcttcattgacttcctgccatcagtgaccctcggtgacacagtcttggtggccaaaccacaccggctagcccagtatgacaacctgtggcggctgagcctgcgtcccgcggagacggcacgcctgcgggctctggaccaggctgactcgggctgccgatctctgtgcctcaagatcctcaaggccatatgcaagtccaccccggctctgggccacctcactgccagccagctaaccaatgtcatcctccacttggcccaggaggaggctgactggtctccggatatgctggccgaccgtttcctgcaggccttgaggggacttatcagctacttagaggctggagtcctgcccagtgccctaaaccccaaggtgaacttatttgcagagctcacccctgaagaaatagacgaattaggatacactctgtattgctcattgtctgagccagaggtgctgctgcagacgtagggcaggtgaaggccaaagcgggtgttggtggtcaggccctggattctccgttagatacacttggctacctagttggtgcctcacagggttcctgctgcctggtgtcttgctgatcatcaccctggtcacttcatgctgattagaatgacatctctttcgtctcctattttgttacccaactcttcctatttttgttaccaatcactgtgctctctgccgccccctggctccaggctaatttttctggaatgaattgagaaggtggcgtgctggcctgagctgatggaccacttggtgttttgcgttttggcccatgtttgctgcctctatctggtctgccttgcccgtttgcctgttcctattcagtgtcttttctattttttcctctctcgttcatgccttctgttttgctcttgtccctggagcatatctgcctaattaagatgttgccttttagttgaatgccactgaagagctgtgatagcatgtttcaaagctgaactctacagagcgagtgctgagacagtatttagggtttctgggagtgaggctggtagaagagttggcctttgaccacggttcctggagtagaagtccatcctccccccaacctcctgacccattcataaatgctgagaatgtctctcatgggaacactgttaatgacccacacaggataagctgaatgcaaagttatttgcaggttgaatttcttggtggctattagcagaagtgcagagtagggaaccagagctggttaagggcctagtgaagggtttgtgtgcccagtgtctgctcgtcatctgtggctgcaggggtcagacagacaaggatggggactgccagggcaccacttcatcatgaatgctggttttcacaccttttccttattttattgccaatcaggacaaggccttgaaggaacgcagccttagacatcaggtgaggatgatggaggtagacagtcgactgaatgtcagctggaaaatccagtcactagttggggtttggtggccatgttttctacccagacaggccctgcttttctaggatgtggccttagagcaagaacagacccaacagccagcccttcatcctccagcgtctgccataggaatgtgagaggggtgtttgctgagcgctccgggcacggccagagggcaagtgagcatgcacggacctcttccccctgtcctgtttctcacccagcacctggggagatcggtgctaccaaggaagagagcacacagataagacagaggggaggaggtgggcatttcctacattcctccttgtttgccgctgctgagattgcagtatttattgcaatgtaaatgtatcctgaaggtggggaggaatgtttaatctaccatgtccgtgtgtcatcttggtttgtgtttttccctgtttgtagcaagactctgatgataattctgtttctcatctgcccattcagtattttgttttccttccgtcaagttgtcttattttttcaatgactacctctccatcattgaggttctggtgaagctctctgcagctgtctcattccttcccaacgatagtaacaggaaatgactctttagcatcgatacctcaacatcaatttagggtagagattcctgcccctcttttgtcacagattaggaaattgagaactagggttaaccttgactatatttagaggtctttttgcctcttttccccttaacaaggatttcttatggtggtttcagtttcatttgcataaaggtattgagagggaacaaaaaacataaagctgagaatcttgagagagctcatctaccctgtctgttggtcagactcaaatgagagttaaaaaaaaaaaaaaaaatctgtatgcctgagtaccatcctggatgaatctagaaggtatggggtagagcttgacagggttcctgtgtacccactgggtatccgttagaggtaagggagaggagaggattgatagagtgttgcaaaagtatagattattcattgagataaaggatttggtttccctgccatgagtattaaaaaaatttaagttttcccaagcttgcatctctgaccaaatttcacataaaacattggaaggaggctgggtgcggtggctcatgcttgtaatcccagcactgggaagctaaggcgggtggatcacttgaggtcaggagttcgagaccagcctggccaacatggtgaaaccccgtctccacgaaaaagataaaaataagctgggcgtggtggcaggcgcctataatcccagctactcgggaggctgaggcaggagaataacttaaacccgggaggcggaggttacagtgagctgagatcgtgccactgcactccagcctgggtgacagagtgagaccctatttcaaaaaaataaaaattggaagaagagcttaaaaaagataagattttaaagagtcccaagttatttaagttgagtgtaattgtcatttaaggaaggcaaatgagtttatcatccttcttaaagagcatctcttttaactgttggacaaaaccataactttgtcattttacaaggaagaacctcttaagaagtcctcagaaccagaagcaatgtgaactctcagcgctggtcctggtgggtttgctgaccatgactgggcaagccgttctttttgctgccatcttcctcatcataaagtgtggaacataggcaattgctttgagattcttggatagaagaggacaacattctgcacctgcccccttttttaaatctttggggaaagatgagtaactttccccactactctgccttcctgttcagtaactcttacttttgcctgaagtaacagcatcttctacttctccatctagagatttttgtgtgtgtgccatcaaggttagcaaactttatacgtagcctaacacttaaaaaatgcactcattatcttaaacctaataaattccagagtttattttggttctcctctgttgcccttcctaaaaaatgagctgaagatgacagtatttttctttacatgcttggttatgacttttaaagttttatttaaataaatgttgaagctcaagtttaaagaagcgttgcagaggcccacggtctcctgggtcccggccacctgtccatattccacatttgctgactgtgctccctgcactccactcaagttgagagttcaaatagtcttgaaggggaatcagcttcaggatggaaggacccaggagaggccccgaggtgggagggttctgtaaatacagactactgcgagtgtccagagctctctgccatgatacttccttgggactgacttggctgagaacgtgttctgtcagaggatttgttagaactctgcccttttgtctgaaactcaaggccaaggagaatgataggagacttaggacagagctgacccttgcaccaggctgggaggctgcagcccttttagatgccacttactgtaagtggccagaataccagagaggtgggttccatggtcaaatgcacagtaggtgtttacctttacatttggatcaccttgtagtctttaaattcttggtccctgaggccaagtccacaacttgccttctagtcacttgcctgcccgcagtggtggtggatgtgttagctggtagatttggaatcagtcaccagtctttctgtactgtcttggttagctctatataagtaggggcagcttagccctgaggcccagagacctgctgtcctttttctccttgagggaggaaataaaactgcggaatacaatgtccttccatagcatgggaagaagaaaataaacatctcctttccaacaaaaaaaaaaaaaaaaaaaaaaaaaaaaaaaa

SEQ ID NO: 790 - protein, 463 aa, Homo sapiens
MAGAGERKGKKDDNGIGTAIDFVLSNARLVLGVGGAAMLGIATLAVKRMYDRAISAPTSPTRLSHSGKRSWEEPNWMGSPRLLNRDMKTGLSRSLQTLPTDSSTFDTDTFCPPRPKPVARKGQVDLKKSRLRMSLQEKLLTYYRNRAAIPAGEQARAKQAAVDICAELRSFLRAKLPDMPLRDMYLSGSLYDDLQVVTADHIQLIVPLVLEQNLWSCIPGEDTIMNVPGFFLVRRENPEYFPRGSSYWDRCVVGGYLSPKTVADTFEKVVAGSINWPAIGSLLDYVIRPAPPPEALTLEVQYERDKHLFIDFLPSVTLGDTVLVAKPHRLAQYDNLWRLSLRPAETARLRALDQADSGCRSLCLKILKAICKSTPALGHLTASQLTNVILHLAQEEADWSPDMLADRFLQALRGLISYLEAGVLPSALNPKVNLFAELTPEEIDELGYTLYCSLSEPEVLLQT

SEQ ID NO: 791 - DNA, 7326 bp, Homo sapiens
  CDS (105)..(6926)
aggacacagcgtccggagccagaggcgctcttaacggcgtttatgtcctttgctgtctgaggggcctcagctctgaccaatctggtcttcgtgtggtcattagcatgggcttcgtgagacagatacagcttttgctctggaagaactggaccctgcggaaaaggcaaaagattcgctttgtggtggaactcgtgtggcctttatctttatttctggtcttgatctggttaaggaatgccaacccgctctacagccatcatgaatgccatttccccaacaaggcgatgccctcagcaggaatgctgccgtggctccaggggatcttctgcaatgtgaacaatccctgttttcaaagccccaccccaggagaatctcctggaattgtgtcaaactataacaactccatcttggcaagggtatatcgagattttcaagaactcctcatgaatgcaccagagagccagcaccttggccgtatttggacagagctacacatcttgtcccaattcatggacaccctccggactcacccggagagaattgcaggaagaggaatacgaataagggatatcttgaaagatgaagaaacactgacactatttctcattaaaaacatcggcctgtctgactcagtggtctaccttctgatcaactctcaagtccgtccagagcagttcgctcatggagtcccggacctggcgctgaaggacatcgcctgcagcgaggccctcctggagcgcttcatcatcttcagccagagacgcggggcaaagacggtgcgctatgccctgtgctccctctcccagggcaccctacagtggatagaagacactctgtatgccaacgtggacttcttcaagctcttccgtgtgcttcccacactcctagacagccgttctcaaggtatcaatctgagatcttggggaggaatattatctgatatgtcaccaagaattcaagagtttatccatcggccgagtatgcaggacttgctgtgggtgaccaggcccctcatgcagaatggtggtccagagacctttacaaagctgatgggcatcctgtctgacctcctgtgtggctaccccgagggaggtggctctcgggtgctctccttcaactggtatgaagacaataactataaggcctttctggggattgactccacaaggaaggatcctatctattcttatgacagaagaacaacatccttttgtaatgcattgatccagagcctggagtcaaatcctttaaccaaaatcgcttggagggcggcaaagcctttgctgatgggaaaaatcctgtacactcctgattcacctgcagcacgaaggatactgaagaatgccaactcaacttttgaagaactggaacacgttaggaagttggtcaaagcctgggaagaagtagggccccagatctggtacttctttgacaacagcacacagatgaacatgatcagagataccctggggaacccaacagtaaaagactttttgaataggcagcttggtgaagaaggtattactgctgaagccatcctaaacttcctctacaagggccctcgggaaagccaggctgacgacatggccaacttcgactggagggacatatttaacatcactgatcgcaccctccgcctggtcaatcaatacctggagtgcttggtcctggataagtttgaaagctacaatgatgaaactcagctcacccaacgtgccctctctctactggaggaaaacatgttctgggccggagtggtattccctgacatgtatccctggaccagctctctaccaccccacgtgaagtataagatccgaatggacatagacgtggtggagaaaaccaataagattaaagacaggtattgggattctggtcccagagctgatcccgtggaagatttccggtacatctggggcgggtttgcctatctgcaggacatggttgaacaggggatcacaaggagccaggtgcaggcggaggctccagttggaatctacctccagcagatgccctacccctgcttcgtggacgattctttcatgatcatcctgaaccgctgtttccctatcttcatggtgctggcatggatctactctgtctccatgactgtgaagagcatcgtcttggagaaggagttgcgactgaaggagaccttgaaaaatcagggtgtctccaatgcagtgatttggtgtacctggttcctggacagcttctccatcatgtcgatgagcatcttcctcctgacgatattcatcatgcatggaagaatcctacattacagcgacccattcatcctcttcctgttcttgttggctttctccactgccaccatcatgctgtgctttctgctcagcaccttcttctccaaggccagtctggcagcagcctgtagtggtgtcatctatttcaccctctacctgccacacatcctgtgcttcgcctggcaggaccgcatgaccgctgagctgaagaaggctgtgagcttactgtctccggtggcatttggatttggcactgagtacctggttcgctttgaagagcaaggcctggggctgcagtggagcaacatcgggaacagtcccacggaaggggacgaattcagcttcctgctgtccatgcagatgatgctccttgatgctgctgtctatggcttactcgcttggtaccttgatcaggtgtttccaggagactatggaaccccacttccttggtactttcttctacaagagtcgtattggcttggcggtgaagggtgttcaaccagagaagaaagagccctggaaaagaccgagcccctaacagaggaaacggaggatccagagcacccagaaggaatacacgactccttctttgaacgtgagcatccagggtgggttcctggggtatgcgtgaagaatctggtaaagatttttgagccctgtggccggccagctgtggaccgtctgaacatcaccttctacgagaaccagatcaccgcattcctgggccacaatggagctgggaaaaccaccaccttgtccatcctgacgggtctgttgccaccaacctctgggactgtgctcgttgggggaagggacattgaaaccagcctggatgcagtccggcagagccttggcatgtgtccacagcacaacatcctgttccaccacctcacggtggctgagcacatgctgttctatgcccagctgaaaggaaagtcccaggaggaggcccagctggagatggaagccatgttggaggacacaggcctccaccacaagcggaatgaagaggctcaggacctatcaggtggcatgcagagaaagctgtcggttgccattgcctttgtgggagatgccaaggtggtgattctggacgaacccacctctggggtggacccttactcgagacgctcaatctgggatctgctcctgaagtatcgctcaggcagaaccatcatcatgtccactcaccacatggacgaggccgacctccttggggaccgcattgccatcattgcccagggaaggctctactgctcaggcaccccactcttcctgaagaactgctttggcacaggcttgtacttaaccttggtgcgcaagatgaaaaacatccagagccaaaggaaaggcagtgaggggacctgcagctgctcgtctaagggtttctccaccacgtgtccagcccacgtcgatgacctaactccagaacaagtcctggatggggatgtaaatgagctgatggatgtagttctccaccatgttccagaggcaaagctggtggagtgcattggtcaagaacttatcttccttcttccaaataagaacttcaagcacagagcatatgccagccttttcagagagctggaggagacgctggctgaccttggtctcagcagttttggaatttctgacactcccctggaagagatttttctgaaggtcacggaggattctgattcaggacctctgtttgcgggtggcgctcagcagaaaagagaaaacgtcaacccccgacacccctgcttgggtcccagagagaaggctggacagacaccccaggactccaatgtctgctccccaggggcgccggctgctcacccagagggccagcctcccccagagccagagtgcccaggcccgcagctcaacacggggacacagctggtcctccagcatgtgcaggcgctgctggtcaagagattccaacacaccatccgcagccacaaggacttcctggcgcagatcgtgctcccggctacctttgtgtttttggctctgatgctttctattgttatccctccttttggcgaataccccgctttgacccttcacccctggatatatgggcagcagtacaccttcttcagcatggatgaaccaggcagtgagcagttcacggtacttgcagacgtcctcctgaataagccaggctttggcaaccgctgcctgaaggaagggtggcttccggagtacccctgtggcaactcaacaccctggaagactccttctgtgtccccaaacatcacccagctgttccagaagcagaaatggacacaggtcaacccttcaccatcctgcaggtgcagcaccagggagaagctcaccatgctgccagagtgccccgagggtgccgggggcctcccgcccccccagagaacacagcgcagcacggaaattctacaagacctgacggacaggaacatctccgacttcttggtaaaaacgtatcctgctcttataagaagcagcttaaagagcaaattctgggtcaatgaacagaggtatggaggaatttccattggaggaaagctcccagtcgtccccatcacgggggaagcacttgttgggtttttaagcgaccttggccggatcatgaatgtgagcgggggccctatcactagagaggcctctaaagaaatacctgatttccttaaacatctagaaactgaagacaacattaaggtgtggtttaataacaaaggctggcatgccctggtcagctttctcaatgtggcccacaacgccatcttacgggccagcctgcctaaggacaggagccccgaggagtatggaatcaccgtcattagccaacccctgaacctgaccaaggagcagctctcagagattacagtgctgaccacttcagtggatgctgtggttgccatctgcgtgattttctccatgtccttcgtcccagccagctttgtcctttatttgatccaggagcgggtgaacaaatccaagcacctccagtttatcagtggagtgagccccaccacctactgggtgaccaacttcctctgggacatcatgaattattccgtgagtgctgggctggtggtgggcatcttcatcgggtttcagaagaaagcctacacttctccagaaaaccttcctgcccttgtggcactgctcctgctgtatggatgggcggtcattcccatgatgtacccagcatccttcctgtttgatgtccccagcacagcctatgtggctttatcttgtgctaatctgttcatcggcatcaacagcagtgctattaccttcatcttggaattatttgagaataaccggacgctgctcaggttcaacgccgtgctgaggaagctgctcattgtcttcccccacttctgcctgggccggggcctcattgaccttgcactgagccaggctgtgacagatgtctatgcccggtttggtgaggagcactctgcaaatccgttccactgggacctgattgggaagaacctgtttgccatggtggtggaaggggtggtgtacttcctcctgaccctgctggtccagcgccacttcttcctctcccaatggattgccgagcccactaaggagcccattgttgatgaagatgatgatgtggctgaagaaagacaaagaattattactggtggaaataaaactgacatcttaaggctacatgaactaaccaagatttatccaggcacctccagcccagcagtggacaggctgtgtgtcggagttcgccctggagagtgctttggcctcctgggagtgaatggtgccggcaaaacaaccacattcaagatgctcactggggacaccacagtgacctcaggggatgccaccgtagcaggcaagagtattttaaccaatatttctgaagtccatcaaaatatgggctactgtcctcagtttgatgcaattgatgagctgctcacaggacgagaacatctttacctttatgcccggcttcgaggtgtaccagcagaagaaatcgaaaaggttgcaaactggagtattaagagcctgggcctgactgtctacgccgactgcctggctggcacgtacagtgggggcaacaagcggaaactctccacagccatcgcactcattggctgcccaccgctggtgctgctggatgagcccaccacagggatggacccccaggcacgccgcatgctgtggaacgtcatcgtgagcatcatcagagaagggagggctgtggtcctcacatcccacagcatggaagaatgtgaggcactgtgtacccggctggccatcatggtaaagggcgcctttcgatgtatgggcaccattcagcatctcaagtccaaatttggagatggctatatcgtcacaatgaagatcaaatccccgaaggacgacctgcttcctgacctgaaccctgtggagcagttcttccaggggaacttcccaggcagtgtgcagagggagaggcactacaacatgctccagttccaggtctcctcctcctccctggcgaggatcttccagctcctcctctcccacaaggacagcctgctcatcgaggagtactcagtcacacagaccacactggaccaggtgtttgtaaattttgctaaacagcagactgaaagtcatgacctccctctgcaccctcgagctgctggagccagtcgacaagcccaggactgatctttcacaccgctcgttcctgcagccagaaaggaactctgggcagctggaggcgcaggagcctgtgcccatatggtcatccaaatggactggccagcgtaaatgaccccactgcagcagaaaacaaacacacgaggagcatgcagcgaattcagaaagaggtctttcagaaggaaaccgaaactgacttgctcacctggaacacctgatggtgaaaccaaacaaatacaaaatccttctccagaccccagaactagaaaccccgggccatcccactagcagctttggcctccatattgctctcatttcaagcagatctgcttttctgcatgtttgtctgtgtgtctgcgttgtgtgtgattttcatggaaaaataaaatgcaaatgcactcatcacaaa

SEQ ID NO: 792 - protein, 2273 aa, Homo sapiens [sequence omitted]

SEQ ID NO: 793 - DNA, 2989 bp, Homo sapiens
  CDS (927)..(2651)
gtctgggccgagcccgcccagctggctgagacgcgtggagcctggcggcgagtgggggcgtgcgacggttactctggttactggggccgcgccgcgctggcgagagccgccgcccgcgagggatgctggtgaggaagccgtcgggagccgccgccgccatctgagggaggtaccctggaaaccaccttttatcggtggggaagtgcagtcgcggtgggcggctctgggggccagcgaaacgggaggcctctaaatctttaggttggggctgcattgccctggagccgcactcttgagtccgaggccatcttttgttggagaaggcgtcggcgttggcgttttcccgaggttgggctgtacagtgtctccgtccgcggaaaaagaagcctctgaacccgcgccggcccgcagcccccgtgccttccggccgctgctcgccgtcgccagaggctaggccacgtttcccccagtgccgaggtgtttctgtgaccctccctccactcccattcccttctgaaagggcacctgctcttggtgagaaaagaaattatagcacgaagagccagtatcagaagagtatccatcacccgcagcaaccgctcagggaacaccatcaaaaaagaaaaaaagggaatatctggatttcctgggcgaggaggagcgagtctgctcgggagctgttccagcaggcgatttttaaatactgctttctacgccctatacaacttggcttcacatacttttacactaactttatatgatttttaaaaactggtctgatcggacttctcgtcctgggacactgtttactggagtctggccggctctccgtgctcctcttggtacctcattttggggagaaccttaaacccactcgagcagataatctccgccttgaccggtgccaccaaagaagccttggaaccatgtggacttttctgggcattgccactttcacctatttttataagaagttcggggacttcatcactttggccaacagggaggtcctgttgtgcgtgctggtgttcctctcgctgggcctggtgctctcctaccgctgtcgccaccgaaacgggggtctcctcgggcgccagcagagcggctcccagttcgccctcttctcggatattctctcaggcctgcctttcattggcttcttctgggccaaatccccccctgaatcagaaaataaggagcagctcgaggccaggaggcgcagaaaaggaaccaatatttcagaaacaagcttaataggaacagctgcctgtacatcaacatcttctcagaatgacccagaagttatcatcgtgggagctggcgtgcttggctctgctttggcagctgtgctttccagagatggaagaaaggtgacagtcattgagagagacttaaaagagcctgacagaatagttggagaattcctgcagccgggtggttatcatgttctcaaagaccttggtcttggagatacagtggaaggtcttgatgcccaggttgtaaatggttacatgattcatgatcaggaaagcaaatcagaggttcagattccttaccctctgtcagaaaacaatcaagtgcagagtggaagagctttccatcacggaagattcatcatgagtctccggaaagcagctatggcagagcccaatgcaaagtttattgaaggtgttgtgttacagttattagaggaagatgatgttgtgatgggagttcagtacaaggataaagagactggagatatcaaggaactccatgctccactgactgttgttgcagatgggcttttctccaagttcaggaaaagcctggtctccaataaagtttctgtatcatctcattttgttggctttcttatgaagaatgcaccacagtttaaagcaaatcatgctgaacttattttagctaacccgagtccagttctcatctaccagatttcatccagtgaaactcgagtacttgttgacattagaggagaaatgccaaggaatttaagagaatacatggttgaaaaaatttacccacaaatacctgatcacctgaaagaaccattcttagaagccactgacaattctcatctgaggtccatgccagcaagcttccttcctccttcatcagtgaagaaacgaggtgttcttcttttgggagacgcatataatatgaggcatccacttactggtggaggaatgactgttgcttttaaagatataaaactatggagaaaactgctaaagggtatccctgacctttatgatgatgcagctattttcgaggccaaaaaatcattttactgggcaagaaaaacatctcattcctttgtcgtgaatatccttgctcaggctctttatgaattattttctgccacagatgattccctgcatcaactaagaaaagcctgttttctttatttcaaacttggtggcgaatgtgttgcgggtcctgttgggctgctttctgtattgtctcctaaccctctagttttaattggacacttctttgctgttgcaatctatgccgtgtatttttgctttaagtcagaaccttggattacaaaacctcgagcccttctcagtagtggtgctgtattgtacaaagcgtgttctgtaatatttcctctaatttactcagaaatgaagtatatggttcattaagcttaaaggggaaccatttgtgaatgaatatttggaacttaccaagtcctaagagacttttggaagaggatatatatagcatagtaccataccacttataaagtggaaactcttggaccaagatttggattaatttgtttttgaagttttttgtatataaatatgtaaatacatgctttaatttgcaatttaaaatgaaggggttaaataagttagacatttaaaagaaatgattgttaccataaattagtgctaatgctgaggagaactacagtttttcttttgaatttagtatttgagatgagttgttgggacatgcaaataaaatgaagaatgaa

SEQ ID NO: 794 - protein, 574 aa, Homo sapiens
MWTFLGIATFTYFYKKFGDFITLANREVLLCVLVFLSLGLVLSYRCRHRNGGLLGRQQSGSQFALFSDILSGLPFIGFFWAKSPPESENKEQLEARRRRKGTNISETSLIGTAACTSTSSQNDPEVIIVGAGVLGSALAAVLSRDGRKVTVIERDLKEPDRIVGEFLQPGGYHVLKDLGLGDTVEGLDAQVVNGYMIHDQESKSEVQIPYPLSENNQVQSGRAFHHGRFIMSLRKAAMAEPNAKFIEGVVLQLLEEDDVVMGVQYKDKETGDIKELHAPLTVVADGLFSKFRKSLVSNKVSVSSHFVGFLMKNAPQFKANHAELILANPSPVLIYQISSSETRVLVDIRGEMPRNLREYMVEKIYPQIPDHLKEPFLEATDNSHLRSMPASFLPPSSVKKRGVLLLGDAYNMRHPLTGGGMTVAFKDIKLWRKLLKGIPDLYDDAAIFEAKKSFYWARKTSHSFVVNILAQALYELFSATDDSLHQLRKACFLYFKLGGECVAGPVGLLSVLSPNPLVLIGHFFAVAIYAVYFCFKSEPWITKPRALLSSGAVLYKACSVIFPLIYSEMKYMVH

SEQ ID NO: 795 - DNA, 5845 bp, Homo sapiens
  CDS (1263)..(2423)
ggtctgagggagcggggcggtctccgccggcgtcgcgcgcgctgtgtgtgagcggggtcgcgcgcgcgcgcggcaggcgagtgagggaacgaggagcggccgggtgtgagtgtgtgggagtgagagtgtgtgggagtggggtgagggagaagctgacgggacgcgaggctgtgagaaactgggcgagtgtgcgaggacgcccggccagcctgcgggagccgcagtcggcggaggagaaaggaggcggctcccggtatcccgaccccctccccctcctctccttcccccacttccagccgcccggcggcccgcgcttcctcgaaggccccagcccggctcagtcggccgagagcgagggaggagccccccgacccaggtgctggagtctgcttgtcagggaggggggcagtctgtgattctgagaacagagccaagaaggggaacagcaaattcagtcacagacaatcctccactcggtcaagagccacttttctcttcctgccttgcccccccgcagggggtaaggaactgagcgtttaatctttagccggttggctaccagctaaaattctacttatcttagtttctagtggatagctttcttattttgcccatgttttcttagaatccctgtttaatatacttttgtcagtagtagtatctaggagtagcagggagagtgacaataaattagccccttcttttttcccttgtcattcaggccccttttcctctccagagggaaattaccagtaaactcttctaaatcttccaccccttctcagtcatactgtgaagaaacacactaaagtggacattatttgaccagtgaacacgaacccagcttcaggcattggtttgttgtggcacatggagaaacatctcttttaaaatatctcccaattacccttttcacaatttgtatccacctaggatttgctgctggggtaagtcactagatttatttctcaaagctcccctctctatgagctgaaagactgaccaaccatgaacactagtaggggatggggaaaggggacagagcagagccagttgttccacactttgggaagcaggagtagcttttatcatcttcctctggggagcaggcatagagacataaactgagtgaaaatgggtggaggaagaacttctatacccacgaacaacatgtgaagagagagaaccaaacataaagtaaggagggtagacgttacatccaagaggaaataatccaggcaaggaagcacaagctgatcaagatgtgtagttctgtggctgccaagttgtggtttttgacagatcgtcgcatcagggaagactatcctcaaaaagagattttacgagcattgaaggccaaatgttgtgaggaggaactggactttagggctgtggtgatggatgaggtggtgctgacaatcgagcaaggaaacctgggtctgcggatcaatggagagctaatcactgcctacccacaagtggtggtagtcagagtaccaaccccttgggtgcaaagtgatagtgacatcactgttttgcgccatctagagaagatgggatgtcggttaatgaaccgacctcaagccatcctgaactgcgttaataagttctggacatttcaagagttggctggccatggtgttcctctgccggatactttctcttatggtggccacgaaaattttgctaaaatgattgatgaggctgaagttctggagttcccaatggtagtaaagaatacgcggggtcacagaggtaaagctgttttcttggctcgagataagcaccatttggctgatctaagccatcttattcgccatgaagcgccatacctgttccagaagtatgttaaagagtctcatggacgggatgtacgtgtcattgtcgtgggaggccgtgtggttggcaccatgttacgttgttcaacagatgggagaatgcaaagcaactgctcattaggtggtgtggggatgatgtgctcattgagtgaacaagggaagcagctagctatccaggtgtctaatatcctggggatggatgtgtgtggcattgacctgctgatgaaagatgacggctccttctgcgtctgtgaggccaatgcaaatgtaggtttcatcgcctttgataaggcttgtaatctagatgtagctggtatcatagcagactatgccgcctcccttctaccctctggccggctcacccggcgtatgtccctgctctccgtggtgtccactgccagtgagactagtgagccggagctgggtcccccagccagcactgctgttgacaacatgagtgcaagttccagctctgttgacagcgaccctgaaagcacggagcgagagctgctcaccaagctcccagggggcctgttcaacatgaaccagctgctagccaatgaaatcaaactactggtggactgactccactggtaattaaccaacaaaacccttgtaaaactttctttcttcttttctatttttaaaaccaacttgcaatgctgttcatggaggatgctcaggaagatgagagaaaattagtaggattagttggagagagtgggagatagatgagacctctgctagtaagatgttactttcatttacaaatcctacaaatagagaggcagaataggtggggtatagaaaaatgtcaggctctcatagttacccttttaaattgctaaaaaatgtgtatgctcataggccatgaggaacaaatactttttttttttcatggtcccttgcttttgtttttgtacaaaaaaaaatggttttgctacaaatatccaagtagcataacttcacattgtgttggaagatttgtcatcagtgaggaaaacatctgcataaattacaggaatttttgtattatacagctctgaaaattctgccatttccttattaactagcagctttagtttgtagtttatgaaatcttgaggggctcttttactgggatttcttatttttttgttttttcccgcttaatttggtgggaggtcaaattgaatataacccaataaaggcttcttaatgacaaaattggcatgtttgcatgatgaaatggaaatgaacagtattgcaatgtccggtatacaaaataacattaattcaatgtagataaaattacactagtttaaaatatgtgcattcacttgtatttgttagtgttttagtcttttttgaaagatgtgctctgttaatgttgcttttttttttttttttaatacatgctagtctaacatttcctgctctatgcctgcatctttaacaatggccaaagtgaagaaaatgctaccttttttgttaacaagacactgacttgaaacatgtacatttaaagccttttattttttccctttttgttttggtagttgggcatttaaataaggacaaggaaaaatatttttgggggcaaatcaagagcctatgagttctaagtataaagctgaagtgatttcgaatgccagcgttatatatttgcatttttcacattttacgagggagtatatgtgtatgtgtgtgcacgcatgcatgtgtatgtgttttgctttttgtttccatcaactaatcaaaaaggataatttagaaaatggagcatgatgggaaacagagtttttgactttaaaaaacagatgagttgttttcataagtagactccactggggtagaggtattcaccttaaaacatagggtgagtagatgcttttttaggcctttttgtgtatatgtacgttgtttgtttttttccttttgtttctagcctgttcagtgtacagtttattcaaggctacatgcttttctttaatgcttctggctatgcattttctctttttacatataggatttgggattgggggtgggttggatgtttttgtttggggacttatttagtagtattgagtctcttatagccctactcttaagccttcaatactgtccactctttatattcctttacttgcagaatttataaaagcccccaaactgcatataatatgagcctttaaaacatgggtaaaactaatcccattgatgggtttggatggtatgttaagaaatggagatgctgcagagcccaacgtaattttttaaacagcaagttttccatctccctacgaatcctctgaagcttttacccaagccctttcttgcctctccagtgctattttccttcagatggaccttaaacataatttcttggacactactagagagacttcgaggcaataataaaagatcagtattaaccagctataacagaggtttgatcatgcttacttgtacagtttttcccccgttttaaaaaggaatgtaataaaatttgttttttccatagaattaaataatattaaaattgagtgaaaggttgattgttgatgaatagaatagtacctctcatctgtgcagtgtctcatttcacctcagagaaaaggatacataagaggagtttgtaatttatcttaggatattctaattgcatttaaaagaacttatcttgcgcagggtaaatgggggactcacatacatatattaatacctctgactcattaacagaaagaaatacttggtacttctttcgctgaatgaccatactgtggaggatgcatactatttggtatagagaaataaatgaggaagaaagaactgcttaattaaattatcattcatatgttcatatagagaccatctggttgccatgtgtattatgacacatacactttgaatagttacatatcacaagtatgtagttcatgtttgtgttggtggggtaaggcatcaggaaaaatgtagttagtcttttcttaacttataccaaattaaccaactatattataggaaatatgtgaaattagttcattagctttattcactattatgcattcacatgatattaaaacgtacactcacatgttagaatgaaaagagcagtagttatcttagattttaaaaacatggatatcttcttgaattccttcaagattgaggtagagaataagagcaaatcattctggaagtaccttaaggaaacaaacagcagcagatatttaggttaaacttattttcataattgtttaataacttttgtataatcttcattgctattatgagagagaatgtatatatcaaatatgtgtaatgataaaatctgaattgtaaaatttttgtatattgttaaaattgtaattctaaattgtatttcaaaaatgattatttctgatattgtttttatgtcacccatgatgaaaactggactttatatatctaaacatacaagtatgaactattctatttaaaatttttaatagtttttttcttttttggtgcctataattgattggtcatttctgctggcttttctccaatgaacattgaaatcttcctgtatatgttaccaataagaaaactaccctggaacagtagaaaaacccaacaagagacttggcattcatcaagcacattatcagactttgagaacatattgaaggcattgactttgaaaatcatctctttttctcaagaagaaagcaatggagaagcaaatttgtttcattcagtgaatccccagtttggggcttgtggggcttagagacattgtgaaatcaaatcttgtgttatacttttctcctggctcactttttttgagaaggtttatgggctatttggctggtgagacacgatcccctcctaagaaaatgtaggtgctcagacaggtaaccactgctgctactgtttttatttgtttgtttgttcaattttatttaagatttgtttttgttgtactaggattttaaaaaatgtaatatattgcaggatttataaccaggaaaaaaaaaaaaaaa

SEQ ID NO: 796 - protein, 386 aa, Homo sapiens
MCSSVAAKLWFLTDRRIREDYPQKEILRALKAKCCEEELDFRAVVMDEVVLTIEQGNLGLRINGELITAYPQVVVVRVPTPWVQSDSDITVLRHLEKMGCRLMNRPQAILNCVNKFWTFQELAGHGVPLPDTFSYGGHENFAKMIDEAEVLEFPMVVKNTRGHRGKAVFLARDKHHLADLSHLIRHEAPYLFQKYVKESHGRDVRVIVVGGRVVGTMLRCSTDGRMQSNCSLGGVGMMCSLSEQGKQLAIQVSNILGMDVCGIDLLMKDDGSFCVCEANANVGFIAFDKACNLDVAGIIADYAASLLPSGRLTRRMSLLSVVSTASETSEPELGPPASTAVDNMSASSSSVDSDPESTERELLTKLPGGLFNMNQLLANEIKLLVD

SEQ ID NO: 797 - DNA, 986 bp, Homo sapiens
  CDS (35)..(538)
aagcaacccagacttcataccagctcccaacaccatgacctgctgccagaccagcttctgtggatatcccagctgctccaccagtgggacatgcggctccagctgctgccagccaagctgctgtgagaccagctgctgccagccaagctgctgccagaccagcttctgcggatttcctagcttctcaactagtgggacctgcagctccagttgctgccagccaagctgctgtgagaccagctgctgccagccaagctgctgccagaccagctcctgcggaactggctgtggcattggtggtggcattggctatggccaggagggcagcagtggagctgtgagcacccgtatcaggtggtgccgcccagactgccgtgtggagggtacctgcctgcccccctgctgtgtggtgagctgcacacccccaacctgctgccagctgcaccacgccgaggcctcctgctgccgcccatcctactgtggacagtcctgctgccgcccagtctgctgctgctactcctgtgagcccacctgctaaaagccagtttgctgattttcaacttgaaatttccactttcagttccattcatgaacgaattatttcttcaagcacttatggacaacgaacaaattcttcaacctttctttgtctttcttatgggggttaccaaatattttggcctcagaattatctgattcctttcaattccagaaagaccttactcttctctctgaggacgccaaaatacaaatttgacccaagaaatgaaaaagccgatttaccttgaaactgagcctttgcaagcattgaagcccacgctctgagtctcagcgccgacgagaccatggaagagccatctgtccttctcaggacactcacttcctgtatcccaccgtcctgcaaattgcaccccctatgaaagaggaataatataccaaggtctaataaattttaactattggtgcaacaaaaaaaaaaaaaaaaa

SEQ ID NO: 798 - protein, 167 aa, Homo sapiens
MTCCQTSFCGYPSCSTSGTCGSSCCQPSCCETSCCQPSCCQTSFCGFPSFSTSGTCSSSCCQPSCCETSCCQPSCCQTSSCGTGCGIGGGIGYGQEGSSGAVSTRIRWCRPDCRVEGTCLPPCCVVSCTPPTCCQLHHAEASCCRPSYCGQSCCRPVCCCYSCEPTC

SEQ ID NO: 799 - DNA, 4316 bp, Homo sapiens
  CDS (40)..(1776)
cgtcatgttagggtgaagcagaggacctcagtgctgaacatgctaaggaggttggacaaaatcaggttcagaggtcacaagagagatgacttcctcgatctagcggagtctccaaatgcctcggacaccgaatgcagcgacgaaatccccctgaaggtaccgcggacctcgccccgggacagcgaggagctgagggaccctgctggtccagggaccctcatcatggccacaggagtccaggactttaaccggacagagtttgatcgactgaatgagatcaaaggtcacctggaaattgccttattggaaaaacatttcttacaggaggagctccggaagctgcgagaagaaaccaacgcggagatgctgcggcaggagctggaccgcgagcggcagcggcggatggagctggagcagaaggtgcaggaggtgctgaaggccagaaccgaggagcagatggctcagcagcccccaaaagggcaggcccaggccagcaatggagcagagcgccggagccaggggctgtcctcgcgcctgcagaagtggttctacgagcggttcggggagtacgtggaggacttccggttccagcccgaggagaacactgtggagacagaggaacccctgagcgcccgcaggttaactgaaaatatgagacggctcaagcgcggtgccaagccggtcactaactttgtgaagaacctctctgccttatccgactggtactccgtctacacgtctgccattgccttcaccgtgtacatgaatgccgtgtggcatggctgggccatcccattgttcttatttctagcaattctgaggttatccctcaattacctcatcgccagggggtggcggatacagtggagcatcgtgcccgaagtgtctgagcccgtggaacctccaaaggaagacctgactgtgtctgagaagttccagctggtgctggacgtcgcccagaaagcccagaaccttttcgggaagatggctgacatcctggagaagatcaagaacttgttcatgtgggtccagccggagatcacacagaagctgtatgtggcgctctgggctgccttcctggcctcctgcttcttcccctaccgcctggtggggcttgccgtgggactctatgctggtatcaagttcttcctcattgatttcatctttaaacgctgcccgaggctgcgcgccaagtacgacacgccctatatcatctggaggagtctccccaccgacccgcagctcaaggagcgctccagcgccgcagtctcacgcaggctgcagacgacctcgtcacggagctacgtacccagcgcaccggccggcctgggtaaagaggaggacgccggtcgcttccacagcaccaagaagggcaatttccacgagatcttcaatctgacagaaaacgagcgtccgctggcggtgtgcgagaatggctggcgctgctgcctcatcaacagggaccggaagatgcccacggactacatcaggaacggggtgctctacgtcacggagaattacttgtgcttcgaaagctccaaatctgggtcctcaaagaggaacaaagtcatcaagctagtggacatcacggacatccagaagtacaaggtcctgtctgtcctcccaggctcaggcatggggattgccgtgtcgacgccatccacccagaaaccgctcgtgtttggtgccatggtgcacagggatgaggccttcgagaccattctcagccagtacatcaagatcacctcagcggcagcgtctggcggggacagctagtattgacttgcccaggacgttgctggaattttctttttctttttctttttctttttttttttttacgatttggtagtggaaacaattggacatcctcatgagcttttgcaataattctcctggacctgtggttctattgtgttgacctctgcgttttatcgaccaagaaggggccagggctcacagggacgggggtgcccctctcccacagggcacgtcaggtgcctctgagggccacccgcagactgggggagggggcagaggccctcgggggcccgtggagaagacacacaggacccctggccctgcccttctccgttccagcctggacagagaaacctctccagccaccccaagaggttctcgcaaccttgtgtcccgctctccagaggccagaagctcgtccaccaccaaagccatagctgaagagtgcggggcccttcctcctggggacagaaagatgtcgtcaaggagggacatgggggcctttcaccaaccaccgagaaacgggcctggcggccctccttcctcttacatgagaccctcctgtggcatttgcccttggtgccgggctggggccgggcgcagtgaccctgcctgcgctccacactcgctccacgggaacagagagggtgagaagggcccacccctcgcctgccctcagtgtctttggtggcaccttccttgctggcctccagggcgctcagcaccgcgtctgtaagggcctgcctgctgctctcggcctgacacgccggccaggaggtctgtagctggggaccagtaagggcacaggatggtgcaggtaaaagcacatctttctcacactttgctctttggaaggcccaggagaacatccgcgaaggctgttggaggtgctccgagcactgtggcatgtctggcacatggcccccaggctgcggttgcctgggttggttgggggaggaagtggggaggagtgttccgggaccatggtggcccaggctgcagccgcctttgggccatccgagaggctctggcagcccctgtgctttagggagcaaccgtgagccgagcccagaggcctgggcctgcactgcctgcagccgacatgcgacagcgttccctcccccgcgtgcctagccggtgccggtccgggcacagacccccccagcccccgccctgccccagggaagcctgggcttcccgggaacaaggtggcatttgtggagggagcgcccgcaggcctggtctgctggggccgcctgcgctgggctgaagggagggaaaggcggcttgggcctcctggaaggaggtggccaccccgcgggcctgcgtgtctgctggggcggatcccgcagctccctcagcttgtcctgagtcccttgggtgtcgttgagattgttgttttttgaagaaacagaagattctattttttacagcgagcaagctggttttcttatttttgtatcctttttcagatgtaatttttatctttgctccgatcctcatttgctggtgtgggtgagggatccggcggcatgggctggtttcacccccttcacgaggggccgcagagtcacacgctggtgccgggggtgctttggggggagctgcgccgatcaccagattaagcacatgtcctatcccaggcggtggagcggagcccccgtggctctggactgcgcggacgttggcgtcaggatgaccacacggcggcctttcccgaatggggacagaacccgctctgagccgtgggtctggctcctgtaggggactggctctcttggtgcaccaggggagggggacatatcccagtgaaccccaccttggcgcctgaggcaacacagggtgggcactgacccacccccaggggcggctgcagaggcagtgcccgcagacaatggccacacctctctccccagggcccggcagtgcccaaggatgggtccggggcctcggggccaatgagcgcctcttcctaggtgctgggattcagtccccaaacacagcgggaggggtccctggggcagatggggctttaccagcgtcgggtggtttagttcgagtcccttttgtggagaaagggagatgaaaactgaccacgtgccaggtgtggccgaagcccccagggagggccacattcggggagcggggggtcgggggagggccaccgactggctctgctgccagcacaggcccctccctggaagtcctcgggagcggagcgcggatcggcacgggctctgggctccccgtggagagaagctgtagtttttaccaaattgtgtacatctgggcagatgtttaatttctgtgactaatcactgaactagacgaatgttaaattttttatgtctgaagcctgagtctattttggatctgtaaataatcattgccagtgtgacttttgttcaacaaaaggattgtactgtattaagaaccgatgaaaaaaattctcctgtaacatttttttaagaaaactttgtttgtttaaagaaaaagtattgtataaattataatttttatttaaataaacctaaaatgctttgtgctaaggctca

SEQ ID NO: 800 - protein, 578 aa, Homo sapiens
MLRRLDKIRFRGHKRDDFLDLAESPNASDTECSDEIPLKVPRTSPRDSEELRDPAGPGTLIMATGVQDFNRTEFDRLNEIKGHLEIALLEKHFLQEELRKLREETNAEMLRQELDRERQRRMELEQKVQEVLKARTEEQMAQQPPKGQAQASNGAERRSQGLSSRLQKWFYERFGEYVEDFRFQPEENTVETEEPLSARRLTENMRRLKRGAKPVTNFVKNLSALSDWYSVYTSAIAFTVYMNAVWHGWAIPLFLFLAILRLSLNYLIARGWRIQWSIVPEVSEPVEPPKEDLTVSEKFQLVLDVAQKAQNLFGKMADILEKIKNLFMWVQPEITQKLYVALWAAFLASCFFPYRLVGLAVGLYAGIKFFLIDFIFKRCPRLRAKYDTPYIIWRSLPTDPQLKERSSAAVSRRLQTTSSRSYVPSAPAGLGKEEDAGRFHSTKKGNFHEIFNLTENERPLAVCENGWRCCLINRDRKMPTDYIRNGVLYVTENYLCFESSKSGSSKRNKVIKLVDITDIQKYKVLSVLPGSGMGIAVSTPSTQKPLVFGAMVHRDEAFETILSQYIKITSAAASGGDS

SEQ ID NO: 801 - DNA, 821 bp, Homo sapiens
  CDS (63)..(716)
aggatcccaaggcccaactccccgaaccactcagggtcctgtggacagctcacctagcggcaatggctgcaggctcccggacgtccctgctcctggcttttggcctgctctgcctgtcctggcttcaagagggcagtgccttcccaaccattcccttatccaggctttttgacaacgctatgctccgcgcccgtcgcctgtaccagctggcatatgacacctatcaggagtttgaagaagcctatatcctgaaggagcagaagtattcattcctgcagaacccccagacctccctctgcttctcagagtctattccaacaccttccaacagggtgaaaacgcagcagaaatctaacctagagctgctccgcatctccctgctgctcatccagtcatggctggagcccgtgcagctcctcaggagcgtcttcgccaacagcctggtgtatggcgcctcggacagcaacgtctatcgccacctgaaggacctagaggaaggcatccaaacgctgatgtggaggctggaagatggcagcccccggactgggcagatcttcaatcagtcctacagcaagtttgacacaaaatcgcacaacgatgacgcactgctcaagaactacgggctgctctactgcttcaggaaggacatggacaaggtcgagacattcctgcgcatcgtgcagtgccgctctgtggagggcagctgtggcttctagctgcccgggtggcatccctgtgacccctccccagtgcctctcctggtcgtggaaggtgctactccagtgcccaccagccttgtcctaataaaattaagttgcatc

SEQ ID NO: 802 - protein, 217 aa, Homo sapiens
MAAGSRTSLLLAFGLLCLSWLQEGSAFPTIPLSRLFDNAMLRARRLYQLAYDTYQEFEEAYILKEQKYSFLQNPQTSLCFSESIPTPSNRVKTQQKSNLELLRISLLLIQSWLEPVQLLRSVFANSLVYGASDSNVYRHLKDLEEGIQTLMWRLEDGSPRTGQIFNQSYSKFDTKSHNDDALLKNYGLLYCFRKDMDKVETFLRIVQCRSVEGSCGF

SEQ ID NO: 803 - DNA, 528 bp, Homo sapiens
  CDS (73)..(423)
ctgtgaggcagtgctgtgtggttcctgccgtccggactctttttcctctactgagattcatctgtgtgaaatatgagttggcgaggaagatcgacctatcggcctagaccaagacgctacgtagagcctcctgaaatgattgggcctatgcggcccgagcagttcagtgatgaagtggaaccagcaacacctgaagaaggggaaccagcaactcaacgtcaggatcctgcagctgctcaggagggagaggatgagggagcatctgcaggtcaagggccgaagcctgaagctgatagccaggaacagggtcacccacagactgggtgtgagtgtgaagatggtcctgatgggcaggagatggacccgccaaatccagaggaggtgaaaacgcctgaagaaggtgaaaagcaatcacagtgttaaaagaagacacgttgaaatgatgcaggctgctcctatgttggaaatttgttcattaaaattctcccaataaagctttacagccttctgcaaagaaaaaaaaaaaaa

SEQ ID NO: 804 - protein, 116 aa, Homo sapiens
MSWRGRSTYRPRPRRYVEPPEMIGPMRPEQFSDEVEPATPEEGEPATQRQDPAAAQEGEDEGASAGQGPKPEADSQEQGHPQTGCECEDGPDGQEMDPPNPEEVKTPEEGEKQSQC

SEQ ID NO: 805 - DNA, 1910 bp, Homo sapiens
  CDS (344)..(1846)
ggggagctatgaaccttaagattagaccactaactcgaatctaaatgagctgcccttgtctcctacaaaagaaaagttgggcaggtagggtattctaatgagggtttctctttctcttaagcaaatgatgatcaaagttaactgacaaactgtcacggaatctgccagacctcactctggccttgctgcttctctccagctcctgaacttttctttcttccatcatgctctgagcccattccttgaaaactaaaaggtccctgactcccagtctgcagccatcctgggcctgctgagctctgattcaagtgcctgcctctgccccttggtgggctgaagcttcatggaggtatccaccaacccctcctccaacatcgatccaggcgactatgttgaaatgaatgattcaatcacccacctaccctctaaagtggtgatacaagatattactatggagctacactgccctctgtgcaatgattggttccgagacccactgatgctaagctgtggccacaacttctgtgaagcctgtatccaagacttttggaggctgcaagcaaaggaaacattctgtcctgagtgtaagatgctatgtcagtataacaactgtacattcaaccctgtactggacaagttggtagagaagattaagaagttacccttactcaagggccatccacagtgcccagagcatggagagaacctgaaactgttcagtaaaccagatgggaaactgatctgctttcaatgcaaggatgctcggttgtctgtggggcagtctaaggagttcctgcaaatctctgatgctgtccatttcttcacggaggagcttgccatccaacagggtcaactggagacaactctgaaggagcttcagaccctgaggaacatgcagaaggaagctattgctgctcacaaggaaaacaagctacatctgcagcaacatgtgtccatggagtttctaaagctgcatcagttcctgcacagcaaagaaaaggacattttaactgagctccgggaagaggggaaagccttgaatgaggagatggagttgaatctgagccagcttcaggagcaatgtctcttagccaaggatatgttggtgagcattcaggcaaagacggaacaacagaactccttcgactttctcaaagacatcacaactctcttacatagcttggagcaaggaatgaaggtgctggcaaccagagagcttatttccagaaagctgaacctgggccagtacaaaggtcctatccagtacatggtatggagggaaatgcaggacactctctgcccaggcctgtctccactaactctggaccctaaaacagctcacccaaatctggtgctctccaaaagccaaaccagcgtctggcatggtgacattaagaagataatgcctgatgatcctgagaggtttgactcaagtgtggctgtactgggctcaagaggcttcacctctggaaagtggtactgggaagtagaagtagcaaagaagacaaaatggacagttggagttgtcagagaatccatcattcggaagggcagctgtcctctaactcctgagcaaggattctggcttttaagactaaggaaccaaactgatctaaaggctctggatttgccttctttcagtctgacactgactaacaacctcgacaaggtgggcatatacctggattatgaaggaggacagttgtccttctacaatgctaaaaccatgactcacatttacaccttcagtaacactttcatggagaaactttatccctacttctgcccctgccttaatgatggtggagagaataaagaaccattgcacatcttacatccacagtaatgagtcataatattatacaaattcagagtgttattaaagaggtattgaaatatttaaaaaaaaa

SEQ ID NO: 806 - protein, 500 aa, Homo sapiens
MEVSTNPSSNIDPGDYVEMNDSITHLPSKVVIQDITMELHCPLCNDWFRDPLMLSCGHNFCEACIQDFWRLQAKETFCPECKMLCQYNNCTFNPVLDKLVEKIKKLPLLKGHPQCPEHGENLKLFSKPDGKLICFQCKDARLSVGQSKEFLQISDAVHFFTEELAIQQGQLETTLKELQTLRNMQKEAIAAHKENKLHLQQHVSMEFLKLHQFLHSKEKDILTELREEGKALNEEMELNLSQLQEQCLLAKDMLVSIQAKTEQQNSFDFLKDITTLLHSLEQGMKVLATRELISRKLNLGQYKGPIQYMVWREMQDTLCPGLSPLTLDPKTAHPNLVLSKSQTSVWHGDIKKIMPDDPERFDSSVAVLGSRGFTSGKWYWEVEVAKKTKWTVGVVRESIIRKGSCPLTPEQGFWLLRLRNQTDLKALDLPSFSLTLTNNLDKVGIYLDYEGGQLSFYNAKTMTHIYTFSNTFMEKLYPYFCPCLNDGGENKEPLHILHPQ

SEQ ID NO: 807 - DNA, 1180 bp, Homo sapiens
  CDS (70)..(579)
gagccacgattcagtcccctggactgtagataaagaccctttcttgccaggtgctgagacaaccacactatgagaggcactccaggagacgctgatggtggaggaagggccgtctatcaatcaatgtgtaaacctattactgggactattaatgatttgaatcagcaagtgtggacccttcagggtcagaaccttgtggcagttccacgaagtgacagtgtgaccccagtcactgttgctgttatcacatgcaagtatccagaggctcttgagcaaggcagaggggatcccatttatttgggaatccagaatccagaaatgtgtttgtattgtgagaaggttggagaacagcccacattgcagctaaaagagcagaagatcatggatctgtatggccaacccgagcccgtgaaacccttccttttctaccgtgccaagactggtaggacctccacccttgagtctgtggccttcccggactggttcattgcctcctccaagagagaccagcccatcattctgacttcagaacttgggaagtcatacaacactgcctttgaattaaatataaatgactgaactcagcctagaggtggcagcttggtctttgtcttaaagtttctggttcccaatgtgttttcgtctacattttcttagtgtcattttcacgctggtgctgagacaggggcaaggctgctgttatcatctcattttataatgaagaagaagcaattacttcatagcaactgaagaacaggatgtggcctcagaagcaggagagctgggtggtataaggctgtcctctcaagctggtgctgtgtaggccacaaggcatctgcatgagtgactttaagactcaaagaccaaacactgagctttcttctaggggtgggtatgaagatgcttcagagctcatgcgcgttacccacgatggcatgactagcacagagctgatctctgtttctgttttgctttattccctcttgggatgatatcatccagtctttatatgttgccaatatacctcattgtgtgtaatagaaccttcttagcattaagaccttgtaaacaaaaataattcttgtgttaagttaaatcatttttgtcctaattgtaatgtgtaatcttaaagttaaataaactttgtgtatttatataataataaagctaaaactgatat

SEQ ID NO: 808 - protein, 169 aa, Homo sapiens
MRGTPGDADGGGRAVYQSMCKPITGTINDLNQQVWTLQGQNLVAVPRSDSVTPVTVAVITCKYPEALEQGRGDPIYLGIQNPEMCLYCEKVGEQPTLQLKEQKIMDLYGQPEPVKPFLFYRAKTGRTSTLESVAFPDWFIASSKRDQPIILTSELGKSYNTAFELNIND

SEQ ID NO: 809 - DNA, 5325 bp, Homo sapiens
  CDS (291)..(4775)
gtgaattatgattttccttagtcagaagcactcatttttacccatgtagaccatccttaggaattaaatattggttatttaatgtagattataatgggaagctgatttttttcacaatggcatatttcaaggacttggttccaaactgagctgaagcttcccaatgcgttttgtacagtctgggaaaaactgtgctgcactggcccacttttgaaggccatcatgctctgtaatataaggatatcatcttattgctgatatctttggagagtccctagcagacacagaaaatgaatggaggcaaagagtgtgacggaggggacaaggaaggaggtcttccagctatacaagttcctgtgggttggcagcgtcgtgtggatcaaaatggagtgctttatgtcagtcccagtgggtctttgttatcttgcttggagcaggttaaaacatacctgcttactgatggaacatgcaagtgtggcttggaatgtcctcttattcttcccaaggtatttaattttgatcctggagctgctgtgaaacagagaaccgcagaagatgttaaggcagatgaagatgtcacaaagctatgcatacataaaagaaaaattattgcagtggccacacttcataaaagcatggaagccccacatccttctctggtgctcaccagtcccggaggaggaacaaatgcaactccagtagtaccttctcgggcagcaactccaagatcagtaagaaataagtctcatgaaggaattacaaattctgtaatgcctgaatgtaagaatcctttcaagttaatgattggatcatcaaatgccatgggaaggctatatgtacaagaactgcctggaagccaacaacaagaactccaccctgtctacccccgacagagattgggcagcagtgaacatggacagaaatctccattccgtggcagccatggaggcctgcccagcccagcgtcatcaggttcccagatatatggagatggttcaatctctccaaggactgacccacttggaagtcctgatgttttcacaagaagtaatcctggttttcatggagctcccaattctagtcctattcacctgaataggactcctctttctccaccttcagtaatgctacatggttctcctgtacagtcatcctgtgcaatggctggaaggactaatatacctctttccccaaccttgactacaaagagtccagtaatgaaaaaaccaatgtgtaatttttcaactaatatggaaataccacgagcaatgttccaccacaaaccaccccaaggcccacctccccctcctccaccttcttgtgctcttcagaaaaagccattaacatctgagaaagatccacttggcattcttgaccctattcctagtaaaccagtgaatcagaaccctgttatcattaatccaaccagtttccattcaaatgtccactctcaggtacctatgatgaatgtaagcatgcctcctgctgttgttcctttgccaagtaatctcccattgccaactgtaaaacctggtcacatgaatcatgggagtcatgtacaaagagttcagcattcagcttcaacctccctgtccccttctccagtgacatcccccgtgcacatgatggggactggaattggaaggattgaggcatcgccccaaagatcacgctcatcttccacatcatcagatcatggaaatttcatgatgccacctgtaggaccccaggccacttctagtggtattaaggttccacccaggtcaccaaggtcaacaatagggtccccaaggccatcaatgccatcaagcccttctaccaagtccgatggacatcatcagtacaaggatatccctaacccattaattgctggaataagtaatgtactaaataccccaagcagtgcagcttttcctactgcatctgccggaagtagttctgtaaagagtcagcctggtttgctgggaatgcctttaaatcagatcttgaaccagcacaatgctgcctcctttccagcaagtagtttactctcagcagcagccaaagcacagctagcaaatcaaaacaaacttgctggtaacaacagtagcagcagtagcaattctggagctgttgccggcagtggcaacactgaaggacatagcactttaaacaccatgttccctcctactgccaacatgcttctcccaacaggtgaagggcaaagtggtcgagcagcactaagagataagctgatgtctcagcaaaaagacgcattgcggaaaagaaaacaaccacctacgacagtgttgagtttgctcagacagtctcaaatggatagttctgcagttcctaaacctggacctgacttgctaaggaagcagggtcagggttcatttcccatcagttcaatgtctcagttactacagtctatgagttgtcaaagctctcacttgagtagcaatagtaccccgggttgtggggcctcaaatactgctttgccttgctctgctaaccagctgcattttacagatcccagtatgaactctagtgttcttcagaacatacctttaagaggggaagccgtgcactgccacaatgcaaacactaactttgttcacagtaacagtccagtccccaaccaccatcttgcaggtttaataaatcagattcaggctagcgggaactgtgggatgctcagtcagtcgggcatggctttaggaaattccttacatcccaatccacctcagtcaagaatttcaacgtcctccactccagtgataccaaacagcattgttagcagctataatcaaacaagttctgaagcaggcggttcaggaccatcatcctccatagccatagcgggcaccaaccaccctgccatcacaaagacaacatctgttcttcaagatggcgtcatagtcaccactgcagctggaaacccactgcagagtcagctacccattgggagtgattttccttttgttggccaggagcacgcacttcattttccatccaacagcacttcaaacaaccatcttccacaccccttgaaccccagcctcctcagttctctacctatctctttgccagtgaatcaacagcatctcctaaaccagaatctattaaatatcctccagccttcagcaggagaaggtgatatgtcatcaataaacaatactttgagtaaccatcaactgactcatctacagtcgctgttaaacaacaatcagatgtttcctccaaatcagcaacagcagcaacttctccaggggtaccagaatctccaggcgttccaaggacagtccacaattccttgcccagctaacaataaccccatggcttgtctgtttcagaactttcaggtgagaatgcaggaagatgcagctctcctaaacaaaagaataagcactcagcctgggctcacagcacttcctgagaatccaaacactacacttccaccttttcaagatacaccttgtgagttgcaaccgaggattgacccatctcttggtcaacaggtgaaggatggcctcgttgtgggtggcccaggtgatgcttccgtagatgccatttacaaagcagttgtcgatgcagccagcaaaggaatgcaggttgtcatcaccactgcagtcaacagtacaactcagatcagccccattccagctctgagtgccatgagtgccttcactgcctcaattggtgacccattaaatctctccagtgctgtcagtgcggtcattcatggacggaacatgggaggtgttgatcatgatggtaggctgaggaattcaagaggggctcggctgcccaagaatctagaccatgggaaaaatgtgaacgaaggagatgggtttgaatatttcaagtcagcaagttgccacacatccaaaaaacagtgggacggggagcaaagccccagaggggagcgaaacaggtggaagtacgaggaatttttagatcatccaggccatatccacagtagtccttgtcatgaaaggcccaacaatgtctctacactgccatttctgcctggggaacagcacccaatactgttaccaccaagaaactgtccaggggataaaattctagaggaaaatttcaggtataataactacaaaagaactatgatgagttttaaggagagactagagaacactgtggaaagatgtgcacacataaatgggaatagacctcgacagagtcggggatttggagagctgctaagcactgcaaagcaagacctggtcctagaggagcagtctccaagttcctcaaatagtttggaaaattctctggtcaaagactacatccattacaatggagactttaatgccaaaagcgttaatgggtgtgtgcctagcccttcagatgctaaaagcattagtagtgaagatgacctaaggaacccagactccccctcttcaaatgaattgatacattatagaccaaggacgttcaatgttggcgacttggtctggggccaaatcaaaggactgacttcctggcctggaaaattagtaagagaagacgacgttcacaattcatgtcaacaaagccccgaggaagggaaggtggagcccgagaagttgaagacactaacagaaggtttggaagcctacagccgtgtccggaaaaggaacagaaaaagtggaaagctaaataaccatttagaagctgctattcatgaggccatgagtgaactggacaaaatgtctgggactgtacaccaaatcccacagggtgacagacaaatgagaccccccaaacccaagaggaggaagatctccagataacagagactactccactaatgcgcagtgtttattaaaggaacatgcacagatgtatctgtatataggtattgatatagccacagttatatcaatatttagactatggcagatagctaccaccaccacagggtgctaaaagaaacagtgatacaaaatttttttgatcaggaaggataatgaatgctggaaaagccaatcaaagtctctgtgtgatgagagtgatcaatggtcaagagattactgagaaactctttttctataatactaaattgtgattataagaaatagtccaaatgtttctgaagaattttcaatgttgtatatagaaaatacagaatttcatggtgatatcagaaatgtaaatattgtacagtattgtcatgtacaagcgtacctaatgcacactttatcttttattgtacaaagaaatagtgtacaaaattctttggtttctatggagtacacctaccagagactaccagtgtaaagtgataaataaaaatacaacctaaatgcttttctatgataatgtaaaaaaaaaaaaaaaaaa

SEQ ID NO: 810 - protein, 1494 aa, Homo sapiens
MNGGKECDGGDKEGGLPAIQVPVGWQRRVDQNGVLYVSPSGSLLSCLEQVKTYLLTDGTCKCGLECPLILPKVFNFDPGAAVKQRTAEDVKADEDVTKLCIHKRKIIAVATLHKSMEAPHPSLVLTSPGGGTNATPVVPSRAATPRSVRNKSHEGITNSVMPECKNPFKLMIGSSNAMGRLYVQELPGSQQQELHPVYPRQRLGSSEHGQKSPFRGSHGGLPSPASSGSQIYGDGSISPRTDPLGSPDVFTRSNPGFHGAPNSSPIHLNRTPLSPPSVMLHGSPVQSSCAMAGRTNIPLSPTLTTKSPVMKKPMCNFSTNMEIPRAMFHHKPPQGPPPPPPPSCALQKKPLTSEKDPLGILDPIPSKPVNQNPVIINPTSFHSNVHSQVPMMNVSMPPAVVPLPSNLPLPTVKPGHMNHGSHVQRVQHSASTSLSPSPVTSPVHMMGTGIGRIEASPQRSRSSSTSSDHGNFMMPPVGPQATSSGIKVPPRSPRSTIGSPRPSMPSSPSTKSDGHHQYKDIPNPLIAGISNVLNTPSSAAFPTASAGSSSVKSQPGLLGMPLNQILNQHNAASFPASSLLSAAAKAQLANQNKLAGNNSSSSSNSGAVAGSGNTEGHSTLNTMFPPTANMLLPTGEGQSGRAALRDKLMSQQKDALRKRKQPPTTVLSLLRQSQMDSSAVPKPGPDLLRKQGQGSFPISSMSQLLQSMSCQSSHLSSNSTPGCGASNTALPCSANQLHFTDPSMNSSVLQNIPLRGEAVHCHNANTNFVHSNSPVPNHHLAGLINQIQASGNCGMLSQSGMALGNSLHPNPPQSRISTSSTPVIPNSIVSSYNQTSSEAGGSGPSSSIAIAGTNHPAITKTTSVLQDGVIVTTAAGNPLQSQLPIGSDFPFVGQEHALHFPSNSTSNNHLPHPLNPSLLSSLPISLPVNQQHLLNQNLLNILQPSAGEGDMSSINNTLSNHQLTHLQSLLNNNQMFPPNQQQQQLLQGYQNLQAFQGQSTIPCPANNNPMACLFQNFQVRMQEDAALLNKRISTQPGLTALPENPNTTLPPFQDTPCELQPRIDPSLGQQVKDGLVVGGPGDASVDAIYKAVVDAASKGMQVVITTAVNSTTQISPIPALSAMSAFTASIGDPLNLSSAVSAVIHGRNMGGVDHDGRLRNSRGARLPKNLDHGKNVNEGDGFEYFKSASCHTSKKQWDGEQSPRGERNRWKYEEFLDHPGHIHSSPCHERPNNVSTLPFLPGEQHPILLPPRNCPGDKILEENFRYNNYKRTMMSFKERLENTVERCAHINGNRPRQSRGFGELLSTAKQDLVLEEQSPSSSNSLENSLVKDYIHYNGDFNAKSVNGCVPSPSDAKSISSEDDLRNPDSPSSNELIHYRPRTFNVGDLVWGQIKGLTSWPGKLVREDDVHNSCQQSPEEGKVEPEKLKTLTEGLEAYSRVRKRNRKSGKLNNHLEAAIHEAMSELDKMSGTVHQIPQGDRQMRPPKPKRRKISR

SEQ ID NO: 811 - DNA, 2461 bp, Homo sapiens
  CDS (173)..(1099)
gcgcgcagtttcccgcatgctcagtagctgaggtagggatgccatccttctcaaaagacttattgacagtgccaaagctcggtactggacacaacgagggacctgggtctacgataacgcgcttttgctcctcctgaagtgtctttggtccaacgttgttccagagtgtaccatggcttccagtaacactgtgttgatgcggttggtagcctccgcatattctattgctcaaaaggcaggaatgatagtcagacgtgttattgctgaaggagacctgggtattgtggagaagacctgtgcaacagacctgcagaccaaagctgaccgattggcacagatgagcatatgttcttcattggcccggaaattccccaaactcacaattataggggaagaggatctgccttctgaggaagtggatcaagagctgattgaagacagtcagtgggaagaaatactgaagcaaccatgcccatcgcagtacagtgctattaaagaagaagatctcgtggtctgggttgatcctctggatggaaccaaggaatataccgaaggtcttcttgacaatgtaacagttcttattggaattgcttatgaaggaaaagccatagcaggagttattaaccagccatattacaactatgaggcaggaccagatgctgtgttggggaggacaatctggggagttttaggtttaggcgcctttgggtttcagctgaaagaagtccctgctgggaaacacattatcacaactactcgatcccatagcaacaagttggttactgactgtgttgctgctatgaaccccgatgctgtgctgcgagtaggaggagcaggaaataagattattcagctgattgaaggcaaagcctctgcttatgtatttgcaagtcctggttgtaagaagtgggatacttgtgctccagaagttattttacatgctgtgggaggcaagttaaccgatatccatgggaatgttcttcagtaccacaaggatgtgaagcatatgaactctgcaggagtcctggccacactgaggaattatgactactatgcaagccgagttccagaatctattaaaaatgcacttgttccttaaaggaaagtttcatttggccgggcgcggtggctcatgcctgtaatcccagcactttgggaggccgaggcaggtggatcacttgagctcaggagtttgagaccagcctgggcaatatcgtgagaccccatctctacaaaaatacaaattaactgggcatcctgtcatgcgcctgtcatcccagctacttgagaggctgaagcagaagaatctcttgagcccggaaggcagaggttgcagtgagctgagatcgtgccactgcactccagcctgagtgacaggagttaagccctgtctcagaaaaaaaaaaaacaaaaacccaaaaagtacttaaagtttcatttacttagctaggagaaagacttggttctcaaaataatacattttaagattaattgggtagaattagagttccacctttattcattgttgagcagtgatttatatttagttattatatttaggaatagaaaatagaattaaataatttaacttgattaatcaaccagaccaattttgacgtctggagaacttataaactcaatatgttatatttgttttcctgtatttaggtggagaaatgagaaaaagctttagttccaattgacagttcaggtcaatgttcaatgaacattcctatcttctaaaccagatttctctttttttttcctgagacggagtctcgctctgtagcctaggctagaatgtagtggcgtgatctcggctcactgcaagctccgcctcccgggttcatgccattctcctgcctcagcctcccgagtagctgggactgcaggcaccgccaccacgcctggctaattttttgtatttttagtagagaaggtgtttcaccgtgttagccaggatggtcttgatctcctgacatcgtgatctgtctgcctcggactcccaaagtgctgggattacaggtgtgagccaccgcacctggcctaaaccagatttctttagggcacaattttttctggaatctcactcttgtttttcacagtaattttaaaaacgtttctactccaattaagaatatatatgatgttattatatatgcttatgaaacagatttatgagaaaagttttttttaaataaattatttaatcctagctctttgttattcaccagctttttaaaaaagtgtttgaaaattatacattctcgactttggggattagtttattcttgtggcatcattataaggcttaattgtggaaagctaagtacttgcttctattccttccaatgagagattataacataaactattaaaattattctgctaatatacctagatttttatttttaggtctctgtccattgcttttaattaaaattatctgttttcaaatcaa

SEQ ID NO: 812 - protein, 308 aa, Homo sapiens
MASSNTVLMRLVASAYSIAQKAGMIVRRVIAEGDLGIVEKTCATDLQTKADRLAQMSICSSLARKFPKLTIIGEEDLPSEEVDQELIEDSQWEEILKQPCPSQYSAIKEEDLVVWVDPLDGTKEYTEGLLDNVTVLIGIAYEGKAIAGVINQPYYNYEAGPDAVLGRTIWGVLGLGAFGFQLKEVPAGKHIITTTRSHSNKLVTDCVAAMNPDAVLRVGGAGNKIIQLIEGKASAYVFASPGCKKWDTCAPEVILHAVGGKLTDIHGNVLQYHKDVKHMNSAGVLATLRNYDYYASRVPESIKNALVP

SEQ ID NO: 813 - DNA, 2341 bp, Homo sapiens
  CDS (94)..(1665)
agtgcctttggcgcactgaggtgcacagggtcccttagccgggcgcagggcgcgcagcccaggctgagatccgcggcttccgtagaagtgagcatggctgggcagcgagtgcttcttctagtgggcttccttctccctggggtcctgctctcagaggctgccaaaatcctgacaatatctacagtaggtggaagccattatctactgatggaccgggtttctcagattcttcaagatcacggtcataatgtcaccatgcttaaccacaaaagaggtccttttatgccagattttaaaaaggaagaaaaatcatatcaagttatcagttggcttgcacctgaagatcatcaaagagaatttaaaaagagttttgatttctttctggaagaaactttaggtggcagaggaaaatttgaaaacttattaaatgttctagaatacttggcgttgcagtgcagtcattttttaaatagaaaggatatcatggattccttaaagaatgagaacttcgacatggtgatagttgaaacttttgactactgtcctttcctgattgctgagaagcttgggaagccatttgtggccattctttccacttcattcggctctttggaatttgggctaccaatccccttgtcttatgttccagtattccgttccttgctgactgatcacatggacttctggggccgagtgaagaattttctgatgttctttagtttctgcaggaggcaacagcacatgcagtctacatttgacaacaccatcaaggaacatttcacagaaggctctaggccagttttgtctcatcttctactgaaagcagagttgtggttcattaactctgactttgcctttgattttgctcgacctctgcttcccaacactgtttatgttggaggcttgatggaaaaacctattaaaccagtaccacaagacttggagaacttcattgccaagtttgaggactctggttttgtccttgtgaccttgggctccatggtgaacacctgtcagaatccggaaatcttcaaggagatgaacaatgcctttgctcacctaccccaaggggtgatatggaagtgtcagtgttctcattggcccaaagatgtccacctggctgcaaatgtgaaaattgtggactggcttcctcagagtgacctcctggctcacccaagcatccgtctgtttgtcacccacggcgggcagaatagcataatggaggccatccagcatggtgtgcccatggtggggatccctctctttggagaccagcctgaaaacatggtccgagtagaagccaaaaagtttggtgtttctattcagttaaagaagctcaaggcagagacattggctcttaagatgaaacaaatcatggaagacaagagatacaagtccgcggcagtggctgccagtgtcatcctgcgctcccacccgctcagccccacacagcggctggtgggctggattgaccacgtcctccagacagggggcgcgacgcacctcaagccctatgtctttcagcagccctggcatgagcagtacctgctcgacgtttttgtgtttctgctggggctcactctggggactctatggctttgtgggaagctgctgggcatggctgtctggtggctgcgtggggccagaaaggtgaaggagacataaggccaggtgcagccttggcggggtctgtttggtgggcgatgtcaccatttctagggagcttcccactagttctggcagccccattctctagtccttctagttatctcctgttttcttgaagaacaggaaaaatggccaaaaatcatcctttccacttgctaattttgctacaaattcatccttactagctcctgcctgctagcagaattctttccagtcctcttgtcctcctttgtttgccatcagcaagggctatgctgtgattctgtctctgagtgacttggaccactgaccctcagatttccagccttaaaatccaccttccttctcatgcgcctctccgaatcacaccctgactcttccagcctccatgtccagacctagtcagcctctctcactcctgcccctactatctatcatggaataacatccaagaaagacaccttgcatattctttcagtttctgttttgttctcccacatattctcttcaatgctcaggaagcctgccctgtgcttgagagttcagggccggacacaggctcacaggtctccacattgggtccctgtctctggtgcccacagtgagctccttcttggctgagcaggcatggagactgtaggtttccagatttcctgaaaaataaaagtttacagcgttatctctccccaacctc

SEQ ID NO: 814 - protein, 523 aa, Homo sapiens
MAGQRVLLLVGFLLPGVLLSEAAKILTISTVGGSHYLLMDRVSQILQDHGHNVTMLNHKRGPFMPDFKKEEKSYQVISWLAPEDHQREFKKSFDFFLEETLGGRGKFENLLNVLEYLALQCSHFLNRKDIMDSLKNENFDMVIVETFDYCPFLIAEKLGKPFVAILSTSFGSLEFGLPIPLSYVPVFRSLLTDHMDFWGRVKNFLMFFSFCRRQQHMQSTFDNTIKEHFTEGSRPVLSHLLLKAELWFINSDFAFDFARPLLPNTVYVGGLMEKPIKPVPQDLENFIAKFEDSGFVLVTLGSMVNTCQNPEIFKEMNNAFAHLPQGVIWKCQCSHWPKDVHLAANVKIVDWLPQSDLLAHPSIRLFVTHGGQNSIMEAIQHGVPMVGIPLFGDQPENMVRVEAKKFGVSIQLKKLKAETLALKMKQIMEDKRYKSAAVAASVILRSHPLSPTQRLVGWIDHVLQTGGATHLKPYVFQQPWHEQYLLDVFVFLLGLTLGTLWLCGKLLGMAVWWLRGARKVKET

SEQ ID NO: 815 - DNA, 846 bp, Homo sapiens
  CDS (77)..(703)
tgggccttcccccaggaagagccccacggccagctccttcctgttcccctggcggcccctcgcttcttccttctggatgggggcccagggggcccaggagagtataaaggcgatgtggagggtgcccggcacaaccagacgcccagtcacaggcgagagccctgggatgcaccggccagaggccatgctgctgctgctcacgcttgccctcctggggggccccacctgggcagggaagatgtatggccctggaggaggcaagtatttcagcaccactgaagactacgaccatgaaatcacagggctgcgggtgtctgtaggtcttctcctggtgaaaagtgtccaggtgaaacttggagactcctgggacgtgaaactgggagccttaggtgggaatacccaggaagtcaccctgcagccaggcgaatacatcacaaaagtctttgtcgccttccaagctttcctccggggtatggtcatgtacaccagcaaggaccgctatttctattttgggaagcttgatggccagatctcctctgcctaccccagccaagaggggcaggtgctggtgggcatctatggccagtatcaactccttggcatcaagagcattggctttgaatggaattatccactagaggagccgaccactgagccaccagttaatctcacatactcagcaaactcacccgtgggtcgctagggtggggtatggggccatccgagctgaggccatctgggtggtggtggctgatggtactggagtaactgagtcgggacgctgaatctgaatccaccaataaataaaggttctgcagaatcagtgcaaaaaaaaaaaaaaaaaaa

SEQ ID NO: 816 - protein, 208 aa, Homo sapiens
MGAQGAQESIKAMWRVPGTTRRPVTGESPGMHRPEAMLLLLTLALLGGPTWAGKMYGPGGGKYFSTTEDYDHEITGLRVSVGLLLVKSVQVKLGDSWDVKLGALGGNTQEVTLQPGEYITKVFVAFQAFLRGMVMYTSKDRYFYFGKLDGQISSAYPSQEGQVLVGIYGQYQLLGIKSIGFEWNYPLEEPTTEPPVNLTYSANSPVGR

SEQ ID NO: 817 - DNA, 1837 bp, Homo sapiens; identical to SEQ ID NO: 5
  CDS (112)..(663)

SEQ ID NO: 818 - protein, 183 aa, Homo sapiens; identical to SEQ ID NO: 6

SEQ ID NO: 819 - DNA, 5582 bp, Homo sapiens
  CDS (163)..(1452)
ggcgtggggggagcagatgccgctggctgccagcgggacgccggcgagcagagcgcagccgcgagggaggcgcgagggaggcgagccggagcccgagcactagcagcagccggagtcggcgtaaagcacccgggcgcagccggagccggtgccgcagctgcgatggccgtggccgtggggagaccgtctaatgaagagcttcgaaacttgtctttgtctggccatgtgggatttgacagcctccctgaccagctggtcaacaagtctacttctcaaggattctgtttcaacatcctttgtgttggtgagacaggcattggcaaatccacgttaatggacactttgttcaacaccaaatttgaaagtgacccagctactcacaatgaaccaggtgttcggttaaaagccagaagttatgagcttcaggaaagcaatgtacggctgaagttaaccattgttgacaccgtgggatttggagaccagataaataaagatgacagctataagccgatagtagaatatattgatgcccagttcgaggcctacctgcaagaggaattgaagattaaacgttctctcttcaactaccatgacacgaggatccatgcctgcctctactttattgcccctactggacattcactaaagtccctggatctggtcaccatgaaaaagctggacagtaaggtgaacatcattccaataattgcaaaagctgacaccattgccaagaatgaactgcacaaattcaagagtaagatcatgagtgaactggtcagcaatggggtccagatatatcagtttcccactgatgaagaaacggtggcagagattaacgcaacaatgagtgtccatctcccatttgcagtggttggcagcaccgaagaggtgaagattggcaacaagatggcaaaggccaggcagtacccctggggtgtggtgcaggttgagaatgaaaatcattgcgattttgtgaaacttcgagagatgctgatccgcgtgaacatggaggacttgcgagagcagactcacacccgccactatgaattgtaccgacgctgtaagcttgaagagatggggttcaaggacactgaccctgacagcaaacccttcagtcttcaggagacatatgaagcaaaaaggaatgaattcctgggagaactgcagaagaaagaagaagaaatgagacaaatgtttgttatgagagtgaaggagaaagaagctgaacttaaggaggcagagaaagagcttcacgagaagtttgaccttctaaagcggacacaccaagaagaaaagaagaaagtggaagacaagaagaaggagcttgaggaggaggtgaacaacttccagaagaagaaagcagcggctcagttactacagtcccaggcccagcaatctggggcccagcaaaccaagaaagacaaggataagaaaaatgcaagcttcacataaagcctggcaagccaaggatgttcccgcattcacctgcttttgcagtaatatcgtatctctgccatgtgtgttctttagttttattttattttattttatttttttacccttcctcaaacaccagtaactattattaactcgttttgctgaatgttgttgggtggtagaaaatgatagaacaagggaataaccgcgaatgctctgtgcagctggactctgtttccggaaagtaaatgatttgctttttatgcctgttctgaatggcagcacgaagcaggcctgttacttgtatgtcgctttggacagaggaaagtggggtaaaatgctacctgtacgtctgacatgaaaacttctcaccgcctcagcagctgaactaaaaacctgaatagccatgacaagagtttgcattttcttgatgattcatctccatgagtgcacaatccctgaactcactgtcttttctccacacttgtcctaagccaaggtagatttgtacgtagacagactggtgagcaagcattatattttatttttacccttgcatgacattttcattttaatcaataacattatttggcctgagcttgtgggtctgttcagactgtctcctctcatggtttgaaactgcatctgaatgcctgccttcaatcctggccaagttggagtagactggtatgagaaaactatgattagttcacatttactggtgcatccttgatcctctcacagatagaggtcttaaaggttggatcatgtaacattgcttagtagaagaatcttcttctaaggatgatgggctttctacagcctgcttaccactaacagtaaggaatctttcataaacacacctcagtttgttcccagtgggcttagagggaggacctgatgactgattccaggatacttgtacttctaataacatttttcatgaatcatgagaaaatttccacagatacttcccttagaaaatttgctataaactctgtatcattggtagcacaaatttgagcgaggccttgtcaattttaaggtggaaataggaaggaccacaacatgacccgtaagtcaagaaggtagacatttcatatccagcttccttgcttagtctcctttcagtatttggcaataaaagaaagaagaaatagaacagctgaagtctcaaatcattgtctggaattttcctcaccttggctagctccacctgctctttgtctaaggcccttgcctcatcagggattagaactggcccatatgccagaacctgtactaaatgcctaatttgtatggaagagtgcatatttaatctcttttctatactgctcctttctgatgcttatcctttcatctgtgtgattgttttttcccctctactaacaagatcctcccagctttctctctacatgtagaaaggataacatttctcatgaacccactgcccctctgcattttcctcactggttagagattaagtaaataggatagaatatgctgcgtctcccctgacacacactttcttttttgaatgagcaagtctccattttgatttcagcaaagattttttctccttttctttgtcctcaaccatacttagaggaaagaaggaatggtcttccatgaactgattatgcttaattaagcaaagtaaggaaattagtttcatggaagcctaaacaaagctggaatagaaactacacactagacacagcagtagtcatagtcttcacaggtttaggagctactggaccaacattcttgtttttgcttttgtttttttaaataattctagtctggagctaactgtggagcagccaaatagtagctggcatgttgattcaaaccatgggctgaatttgctcataggctgtgcatcagacaaaagcttgaatatttgtgttgtatgcttgttccaaccaccgcttgtgtgagcatttttgtggcttgtacagaaagtacacttttaaattgtctcttgcatcactaaaatttttttaaaatgagcataacaacgaaaggcatccagctgactttttgattccaagattattgattggattgacttttttgcattaaatttttcccagcaaaataaatcatatggcgagtcagggaataaaaagtcaaaagaaacaaatagaagcttttttttttaaaaaatgtattgcttctgaacttttttctgccactgctccctagccctgtttagtttgttattgctgcttttcttttttctttctgtatctatgcctttttttcacagtagtccttggctctgcacggaataaatgataccctcaaatctaattggatgtgctttcgcctttgcatgtaagtacggtagtaagaaacctttgagatctttctgacttttcaaaattagagaaagcaaatgggatggatagattttttttttcttttcaaggggggcaggaaggtaatggtttgagtagcctttgtttaaaaaaaagactaaatatatttaaaaggccacatttatatttttttcacaagaaccacataataaattccacttcttgacctgaatttggaaatccgaaattactaatccaggccaggtgtggtggctcatgcctgtaatcccagcactttgagaggccgaggtgggcagatcacttgaggcctggagttcaagaccaccttggcgaacacggtgaaaccccgtctctacaaaaaatacaaaaattagccaggcgtggtggcacgtgcctgtagtcccagctacttgggaggctaagtcaggagaattgcttgaacttgggagatggaggttgcagtgagccaagattgcaccactgcattccaacctgggtgatgaagtgagactctccaaaaaaaaaaaagaaattattaatccctgcctgtgctctacatagcctcatgggcatcattggatagctcagagggcccttgattctggcaaggcaaataaagccagaatgagaaattaccatcttctactagagaaaaccaagagaaaaatttttatgctaggatgcctttatgaccacttaattttttaatcttagtttaatggtctctccctggtgctaactgctgacagtggccacctcttttttggggattgaggggcctacataactagctggccttaccccatatcttttgttcaaacataataccatctttttgcttcttctgaactttagatctccataacacatgtactgtagaatgtgatggaaaagcattgatgagaatttattggcagttcagattgtgttttcccaacttaggctctttattaattggttaaggttttctccaaaaagggcatttcaacaatgggaattatttaatgtaacagtgggcacagattacttatcttccttctctgctttgtgactcaccagcagtaacacacacaatccacatcttgtgcacctcaaatgaacagacttggtttccttgctttcttgacatttccatgactgtttcacatacaaactattgggtgaggtttttcagctgttaccgacccacgtcctgctgtctctgtgtggtcctacaaaaactgtccattcccacccctttgctttgccatttgcaagagtctggaattgtcaggtctcagcttcgaaaagtcctggttccactgacaggacacattctttagtgggaattaagacctacaaagtctagtttgtatgtaggtatgaagggaattttttaaataaattgaaaagctgtgaacagcattagaactttgtctatttcttaattttaaaatatgctgatatgccttaaactgtagttgtagatccttgtcattttgctgtttgaaaataaccaatgtgttttctaaaactgtcgtgtaatctactttcattgttaatgcagaattgtcatatatgtaagctgcatgttagacatttgtcttttttaaactaaagtaattgtattgatgtgaagcatatcattttttcaaatatgaaagtgatcacttagcaacatgcttggtaatttggcatctgttaaggtaggagagtggtgaacagataatctatgcatatatcactagtgccaagacataaagcgggggaaaatatatttttacccaaacattaaaaaaaaaaaaaaaaaaaaaaaaaaaa

SEQ ID NO: 820 - protein, 429 aa, Homo sapiens
MAVAVGRPSNEELRNLSLSGHVGFDSLPDQLVNKSTSQGFCFNILCVGETGIGKSTLMDTLFNTKFESDPATHNEPGVRLKARSYELQESNVRLKLTIVDTVGFGDQINKDDSYKPIVEYIDAQFEAYLQEELKIKRSLFNYHDTRIHACLYFIAPTGHSLKSLDLVTMKKLDSKVNIIPIIAKADTIAKNELHKFKSKIMSELVSNGVQIYQFPTDEETVAEINATMSVHLPFAVVGSTEEVKIGNKMAKARQYPWGVVQVENENHCDFVKLREMLIRVNMEDLREQTHTRHYELYRRCKLEEMGFKDTDPDSKPFSLQETYEAKRNEFLGELQKKEEEMRQMFVMRVKEKEAELKEAEKELHEKFDLLKRTHQEEKKKVEDKKKELEEEVNNFQKKKAAAQLLQSQAQQSGAQQTKKDKDKKNASFT

SEQ ID NO: 821 - DNA, 5927 bp, Homo sapiens
  CDS (127)..(4521)
tcgtcggagcagacgggagtttctcctcggggtcggagcaggaggcacgcggagtgtgaggccacgcatgagcggacgctaaccccctccccagccacaaagagtctacatgtctagggtctagacatgttcagctttgtggacctccggctcctgctcctcttagcggccaccgccctcctgacgcacggccaagaggaaggccaagtcgagggccaagacgaagacatcccaccaatcacctgcgtacagaacggcctcaggtaccatgaccgagacgtgtggaaacccgagccctgccggatctgcgtctgcgacaacggcaaggtgttgtgcgatgacgtgatctgtgacgagaccaagaactgccccggcgccgaagtccccgagggcgagtgctgtcccgtctgccccgacggctcagagtcacccaccgaccaagaaaccaccggcgtcgagggacccaagggagacactggcccccgaggcccaaggggacccgcaggcccccctggccgagatggcatccctggacagcctggacttcccggaccccccggaccccccggacctcccggaccccctggcctcggaggaaactttgctccccagctgtcttatggctatgatgagaaatcaaccggaggaatttccgtgcctggccccatgggtccctctggtcctcgtggtctccctggcccccctggtgcacctggtccccaaggcttccaaggtccccctggtgagcctggcgagcctggagcttcaggtcccatgggtccccgaggtcccccaggtccccctggaaagaatggagatgatggggaagctggaaaacctggtcgtcctggtgagcgtgggcctcctgggcctcagggtgctcgaggattgcccggaacagctggcctccctggaatgaagggacacagaggtttcagtggtttggatggtgccaagggagatgctggtcctgctggtcctaagggtgagcctggcagccctggtgaaaatggagctcctggtcagatgggcccccgtggcctgcctggtgagagaggtcgccctggagcccctggccctgctggtgctcgtggaaatgatggtgctactggtgctgccgggccccctggtcccaccggccccgctggtcctcctggcttccctggtgctgttggtgctaagggtgaagctggtccccaagggccccgaggctctgaaggtccccagggtgtgcgtggtgagcctggcccccctggccctgctggtgctgctggccctgctggaaaccctggtgctgatggacagcctggtgctaaaggtgccaatggtgctcctggtattgctggtgctcctggcttccctggtgcccgaggcccctctggaccccagggccccggcggccctcctggtcccaagggtaacagcggtgaacctggtgctcctggcagcaaaggagacactggtgctaagggagagcctggccctgttggtgttcaaggaccccctggccctgctggagaggaaggaaagcgaggagctcgaggtgaacccggacccactggcctgcccggaccccctggcgagcgtggtggacctggtagccgtggtttccctggcgcagatggtgttgctggtcccaagggtcccgctggtgaacgtggttctcctggccctgctggccccaaaggatctcctggtgaagctggtcgtcccggtgaagctggtctgcctggtgccaagggtctgactggaagccctggcagccctggtcctgatggcaaaactggcccccctggtcccgccggtcaagatggtcgccccggacccccaggcccacctggtgcccgtggtcaggctggtgtgatgggattccctggacctaaaggtgctgctggagagcccggcaaggctggagagcgaggtgttcccggaccccctggcgctgtcggtcctgctggcaaagatggagaggctggagctcagggaccccctggccctgctggtcccgctggcgagagaggtgaacaaggccctgctggctcccccggattccagggtctccctggtcctgctggtcctccaggtgaagcaggcaaacctggtgaacagggtgttcctggagaccttggcgcccctggcccctctggagcaagaggcgagagaggtttccctggcgagcgtggtgtgcaaggtccccctggtcctgctggtccccgaggggccaacggtgctcccggcaacgatggtgctaagggtgatgctggtgcccctggagctcccggtagccagggcgcccctggccttcagggaatgcctggtgaacgtggtgcagctggtcttccagggcctaagggtgacagaggtgatgctggtcccaaaggtgctgatggctctcctggcaaagatggcgtccgtggtctgactggccccattggtcctcctggccctgctggtgcccctggtgacaagggtgaaagtggtcccagcggccctgctggtcccactggagctcgtggtgcccccggagaccgtggtgagcctggtccccccggccctgctggctttgctggcccccctggtgctgacggccaacctggtgctaaaggcgaacctggtgatgctggtgctaaaggcgatgctggtccccctggccctgccggacccgctggaccccctggccccattggtaatgttggtgctcctggagccaaaggtgctcgcggcagcgctggtccccctggtgctactggtttccctggtgctgctggccgagtcggtcctcctggcccctctggaaatgctggaccccctggccctcctggtcctgctggcaaagaaggcggcaaaggtccccgtggtgagactggccctgctggacgtcctggtgaagttggtccccctggtccccctggccctgctggcgagaaaggatcccctggtgctgatggtcctgctggtgctcctggtactcccgggcctcaaggtattgctggacagcgtggtgtggtcggcctgcctggtcagagaggagagagaggcttccctggtcttcctggcccctctggtgaacctggcaaacaaggtccctctggagcaagtggtgaacgtggtccccctggtcccatgggcccccctggattggctggaccccctggtgaatctggacgtgagggggctcctggtgccgaaggttcccctggacgagacggttctcctggcgccaagggtgaccgtggtgagaccggccccgctggaccccctggtgctcctggtgctcctggtgcccctggccccgttggccctgctggcaagagtggtgatcgtggtgagactggtcctgctggtcccgccggtcctgtcggccctgttggcgcccgtggccccgccggaccccaaggcccccgtggtgacaagggtgagacaggcgaacagggcgacagaggcataaagggtcaccgtggcttctctggcctccagggtccccctggccctcctggctctcctggtgaacaaggtccctctggagcctctggtcctgctggtccccgaggtccccctggctctgctggtgctcctggcaaagatggactcaacggtctccctggccccattgggccccctggtcctcgcggtcgcactggtgatgctggtcctgttggtccccccggccctcctggacctcctggtccccctggtcctcccagcgctggtttcgacttcagcttcctgccccagccacctcaagagaaggctcacgatggtggccgctactaccgggctgatgatgccaatgtggttcgtgaccgtgacctcgaggtggacaccaccctcaagagcctgagccagcagatcgagaacatccggagcccagagggcagccgcaagaaccccgcccgcacctgccgtgacctcaagatgtgccactctgactggaagagtggagagtactggattgaccccaaccaaggctgcaacctggatgccatcaaagtcttctgcaacatggagactggtgagacctgcgtgtaccccactcagcccagtgtggcccagaagaactggtacatcagcaagaaccccaaggacaagaggcatgtctggttcggcgagagcatgaccgatggattccagttcgagtatggcggccagggctccgaccctgccgatgtggccatccagctgaccttcctgcgcctgatgtccaccgaggcctcccagaacatcacctaccactgcaagaacagcgtggcctacatggaccagcagactggcaacctcaagaaggccctgctcctccagggctccaacgagatcgagatccgcgccgagggcaacagccgcttcacctacagcgtcactgtcgatggctgcacgagtcacaccggagcctggggcaagacagtgattgaatacaaaaccaccaagacctcccgcctgcccatcatcgatgtggcccccttggacgttggtgccccagaccaggaattcggcttcgacgttggccctgtctgcttcctgtaaactccctccatcccaacctggctccctcccacccaaccaactttccccccaacccggaaacagacaagcaacccaaactgaaccccctcaaaagccaaaaaatgggagacaatttcacatggactttggaaaatatttttttcctttgcattcatctctcaaacttagtttttatctttgaccaaccgaacatgaccaaaaaccaaaagtgcattcaaccttaccaaaaaaaaaaaaaaaaaaagaataaataaataactttttaaaaaaggaagcttggtccacttgcttgaagacccatgcgggggtaagtccctttctgcccgttgggcttatgaaaccccaatgctgccctttctgctcctttctccacaccccccttggggcctcccctccactccttcccaaatctgtctccccagaagacacaggaaacaatgtattgtctgcccagcaatcaaaggcaatgctcaaacacccaagtggcccccaccctcagcccgctcctgcccgcccagcacccccaggccctgggggacctggggttctcagactgccaaagaagccttgccatctggcgctcccatggctcttgcaacatctccccttcgtttttgagggggtcatgccgggggagccaccagcccctcactgggttcggaggagagtcaggaagggccacgacaaagcagaaacatcggatttggggaacgcgtgtcaatcccttgtgccgcagggctgggcgggagagactgttctgttccttgtgtaactgtgttgctgaaagactacctcgttcttgtcttgatgtgtcaccggggcaactgcctgggggcggggatgggggcagggtggaagcggctccccattttataccaaaggtgctacatctatgtgatgggtggggtggggagggaatcactggtgctatagaaattgagatgcccccccaggccagcaaatgttcctttttgttcaaagtctatttttattccttgatatttttctttttttttttttttttttgtggatggggacttgtgaatttttctaaaggtgctatttaacatgggaggagagcgtgtgcggctccagcccagcccgctgctcactttccaccctctctccacctgcctctggcttctcaggcctctgctctccgacctctctcctctgaaaccctcctccacagctgcagcccatcctcccggctccctcctagtctgtcctgcgtcctctgtccccgggtttcagagacaacttcccaaagcacaaagcagtttttccccctaggggtgggaggaagcaaaagactctgtacctattttgtatgtgtataataatttgagatgtttttaattattttgattgctggaataaagcatgtggaaatgacccaaacataa

SEQ ID NO: 822 - protein, 1464 aa, Homo sapiens
MFSFVDLRLLLLLAATALLTHGQEEGQVEGQDEDIPPITCVQNGLRYHDRDVWKPEPCRICVCDNGKVLCDDVICDETKNCPGAEVPEGECCPVCPDGSESPTDQETTGVEGPKGDTGPRGPRGPAGPPGRDGIPGQPGLPGPPGPPGPPGPPGLGGNFAPQLSYGYDEKSTGGISVPGPMGPSGPRGLPGPPGAPGPQGFQGPPGEPGEPGASGPMGPRGPPGPPGKNGDDGEAGKPGRPGERGPPGPQGARGLPGTAGLPGMKGHRGFSGLDGAKGDAGPAGPKGEPGSPGENGAPGQMGPRGLPGERGRPGAPGPAGARGNDGATGAAGPPGPTGPAGPPGFPGAVGAKGEAGPQGPRGSEGPQGVRGEPGPPGPAGAAGPAGNPGADGQPGAKGANGAPGIAGAPGFPGARGPSGPQGPGGPPGPKGNSGEPGAPGSKGDTGAKGEPGPVGVQGPPGPAGEEGKRGARGEPGPTGLPGPPGERGGPGSRGFPGADGVAGPKGPAGERGSPGPAGPKGSPGEAGRPGEAGLPGAKGLTGSPGSPGPDGKTGPPGPAGQDGRPGPPGPPGARGQAGVMGFPGPKGAAGEPGKAGERGVPGPPGAVGPAGKDGEAGAQGPPGPAGPAGERGEQGPAGSPGFQGLPGPAGPPGEAGKPGEQGVPGDLGAPGPSGARGERGFPGERGVQGPPGPAGPRGANGAPGNDGAKGDAGAPGAPGSQGAPGLQGMPGERGAAGLPGPKGDRGDAGPKGADGSPGKDGVRGLTGPIGPPGPAGAPGDKGESGPSGPAGPTGARGAPGDRGEPGPPGPAGFAGPPGADGQPGAKGEPGDAGAKGDAGPPGPAGPAGPPGPIGNVGAPGAKGARGSAGPPGATGFPGAAGRVGPPGPSGNAGPPGPPGPAGKEGGKGPRGETGPAGRPGEVGPPGPPGPAGEKGSPGADGPAGAPGTPGPQGIAGQRGVVGLPGQRGERGFPGLPGPSGEPGKQGPSGASGERGPPGPMGPPGLAGPPGESGREGAPGAEGSPGRDGSPGAKGDRGETGPAGPPGAPGAPGAPGPVGPAGKSGDRGETGPAGPAGPVGPVGARGPAGPQGPRGDKGETGEQGDRGIKGHRGFSGLQGPPGPPGSPGEQGPSGASGPAGPRGPPGSAGAPGKDGLNGLPGPIGPPGPRGRTGDAGPVGPPGPPGPPGPPGPPSAGFDFSFLPQPPQEKAHDGGRYYRADDANVVRDRDLEVDTTLKSLSQQIENIRSPEGSRKNPARTCRDLKMCHSDWKSGEYWIDPNQGCNLDAIKVFCNMETGETCVYPTQPSVAQKNWYISKNPKDKRHVWFGESMTDGFQFEYGGQGSDPADVAIQLTFLRLMSTEASQNITYHCKNSVAYMDQQTGNLKKALLLQGSNEIEIRAEGNSRFTYSVTVDGCTSHTGAWGKTVIEYKTTKTSRLPIIDVAPLDVGAPDQEFGFDVGPVCFL

SEQ ID NO: 823 - DNA, 4077 bp, Homo sapiens
  CDS (359)..(1906)
gtaagtgtgaggggcatgagtatacacgagtgtgcgtgtctttccctctcccttatttgtctccgtatgagtctctccttgtaccctccccctgcctcgatgatattactcccccagacttggaagccgctgccagagtgacgctttgatggtatctgcaagcgtttttgctgatcttatctctgccccctgaatattaattccctaatctggtagcaatccatctccccagtgaaggacctactagaggcaggtggggggagccaccatcagatcataagcataagaataatacaaaggggagggattcttctgcaaccaagaggcaagaggcgagagaaggaaaaaaaaaaaagcgatgagttcgccaaatatatggagcacaggaagctcagtctactcgactcctgtattttcacagaaaatgacggtgtggattctgctcctgctgtcgctctaccctggcttcactagccagaaatctgatgatgactatgaagattatgcttctaacaaaacatgggtcttgactccaaaagttcctgagggtgatgtcactgtcatcttaaacaacctgctggaaggatatgacaataaacttcggcctgatataggagtgaagccaacgttaattcacacagacatgtatgtgaatagcattggtccagtgaacgctatcaatatggaatacactattgatatattttttgcgcaaacgtggtatgacagacgtttgaaatttaacagcaccattaaagtcctccgattgaacagcaacatggtggggaaaatctggattccagacactttcttcagaaattccaaaaaagctgatgcacactggatcaccacccccaacaggatgctgagaatttggaatgatggtcgagtgctctacaccctaaggttgacaattgatgctgagtgccaattacaattgcacaactttccaatggatgaacactcctgccccttggagttctccagttggtctcgttctattgcccaggctggaatgtgcagtggtgtgatctcggctcactacagccttcgcttctggggctcaactgatcctcccaccttggcctccagagtagctgggatttcagatggctatccacgtgaagaaattgtttatcaatggaagcgaagttctgttgaagtgggcgacacaagatcctggaggctttatcaattctcatttgttggtctaagaaataccaccgaagtagtgaagacaacttccggagattatgtggtcatgtctgtctactttgatctgagcagaagaatgggatactttaccatccagacctatatcccctgcacactcattgtcgtcctatcctgggtgtctttctggatcaataaggatgctgttccagccagaacatctttaggtatcaccactgtcctgacaatgaccaccctcagcaccattgcccggaaatcgctccccaaggtctcctatgtcacagcgatggatctctttgtatctgtttgtttcatctttgtcttctctgctctggtggagtatggcaccttgcattattttgtcagcaaccggaaaccaagcaaggacaaagataaaaagaagaaaaaccctcttcttcggatgttttccttcaaggcccctaccattgatatccgcccaagatcagcaaccattcaaatgaataatgctacacaccttcaagagagagatgaagagtacggctatgagtgtctggacggcaaggactgtgccagttttttctgctgttttgaagattgtcgaacaggagcttggagacatgggaggatacatatccgcattgccaaaatggactcctatgctcggatcttcttccccactgccttctgcctgtttaatctggtctattgggtctcctacctctacctgtgaggaggtatgggttttactgatatggttcttattcactgagtctcatggagagatgtctgttctaagtccacttaaataatcctctatgtggttgataatgatctgaatctgtttctatgtccaaacctggtaaattttataatgtcatattgtttgtgcccagccctcctttggttagtgtactttgaacttcgatgtttgctgtgtttcaaacctgcaaggcaaagtaaaattagagcaagaacattcaaaccaaataagatatttttcagctacagcaaataaaacagtgaaagccctgactatttacagtagtggtatccttactagattcataatgcaattagatagaaaaggtccaaaactgtaccctatgttcactccgggtcaagttgtgataaatttgatcccaatagaatacctccctcatttaagaaaaatcataactcactttaaatatgaaagcctagtccagaaatctattacacctttatctcaagataggaagaaaatttcctccacattcatgtacaatgatgtaaatatttcaataacttagaatgcttcaagtttagtgcatgcatctctttagatccaaaataaatggactgaagttatcatcctattgtcttttattttgtgtccttgggctataaaagattcctgaatgtaattataaggatttgggtttggaaatggagggaggaattttcattgccttctccctcatgcatgaagattcgaacagcttattttttccttgtatgacatattacaacactttaagtaaaatatagactggataatcaacatttgccacctctaaatatgcccaatttcataactagagtataaagtaattgtatgtgcttgccgctatttttttcttccttttaggatgatagatcataacagaacttattctccatctcaagatctgcttctagtgattgtgagtgccttgtgggcagaatccttgtcatttcctctttgggtctgtagcaccttgcatagtgcctggcatatagttggtgctcaataaatatggtttgaagtgaattgccctcacatgcttctggcaaatctctgtgctggcctgaaaccagtgactcatcttctcacataggtgttgtcaagtgatatttgattttgtaaaaataaccagtaggatccaaagaactttagctatttatgttcatcttcaaaaaattattttaggcaaagtccatactccttttaaaacaatatttatgtcctatgtttgtgtatagacatgactctactagggcataattagagtttgtgtattatttttccaggtttggggatgagtcagtccttgcccatccacaattttgtttgtgaacttataacaggaataagcaaaattcatacctgactagtgttcagaatgtagcattctgtgcgaaaaagtattgaagattagcttttaaaaactgaaaaaaaaaaatgaatgactcacatagaggttgagccaatgactgtggcctcattagattacattgtagttaaacaaagcaatttctccagacttaaaacatgatgagttgagctctatcttcatgtactcatcctgaatccttatttttctaaaatagcaccctttgttaattatttttatggaaattattactctgtcataattaaatcatagctagtataactttacagataacctaaaaagaatagaaaagaagagagagtggctttgtcagtataaaaccatgtaaagtcatcatcaagtcatctggatgaatcttgaaacacatttagctgccagttttacaaacctttaatatatcagtgctccagtatataacctcaaacaaatgtaaatagaacgaattattttcttgttttgaattgtcaatatattaaatgttgactctttgggagagttgttggcaagtttcaatggtgagaaacattattgtcaacttgaaatgtgttctgtaatggggacactacaaaaagctagctttccaatgtgtgcatagtattggcaatatgaatatatattatatataatctaatacttattataagctgctccctgtctatgtatttggaaaccttttcacaaagggaattgcctaacatgtggacttttacaataaaaatgctgcattctaatccatggtggcatctca

SEQ ID NO: 824 - protein, 515 aa, Homo sapiens
MSSPNIWSTGSSVYSTPVFSQKMTVWILLLLSLYPGFTSQKSDDDYEDYASNKTWVLTPKVPEGDVTVILNNLLEGYDNKLRPDIGVKPTLIHTDMYVNSIGPVNAINMEYTIDIFFAQTWYDRRLKFNSTIKVLRLNSNMVGKIWIPDTFFRNSKKADAHWITTPNRMLRIWNDGRVLYTLRLTIDAECQLQLHNFPMDEHSCPLEFSSWSRSIAQAGMCSGVISAHYSLRFWGSTDPPTLASRVAGISDGYPREEIVYQWKRSSVEVGDTRSWRLYQFSFVGLRNTTEVVKTTSGDYVVMSVYFDLSRRMGYFTIQTYIPCTLIVVLSWVSFWINKDAVPARTSLGITTVLTMTTLSTIARKSLPKVSYVTAMDLFVSVCFIFVFSALVEYGTLHYFVSNRKPSKDKDKKKKNPLLRMFSFKAPTIDIRPRSATIQMNNATHLQERDEEYGYECLDGKDCASFFCCFEDCRTGAWRHGRIHIRIAKMDSYARIFFPTAFCLFNLVYWVSYLYL

SEQ ID NO: 825 - DNA, 1970 bp, Homo sapiens
  CDS (194)..(841)
ctttgaaaaagacttcttttgagctaactttcttatactggtacctttctaatctcactacaatatgtaacattggtgttcgatctcaagtatttctgaatatattcccctatccacagaaatatactctgggggaaaaaaaatagaacaaattcttgccgtcctgaccattgaacaagagactaattagacaatggggctagaaaaacctcaaagtaaactggaaggaggcatgcatccccagctgataccttcggttattgctgtagttttcatcttacttctcagtgtctgttttattgcaagttgtttggtgactcatcacaacttttcacgctgtaagagaggcacaggagtgcacaagttagagcaccatgcaaagctcaaatgcatcaaagagaaatcagaactgaaaagtgctgaagggagcacctggaactgttgtcctattgactggagagccttccagtccaactgctattttcctcttactgacaacaagacgtgggctgagagtgaaaggaactgttcagggatgggggcccatctgatgaccatcagcacggaagctgagcagaactttattattcagtttctggatagacggctttcctatttccttggacttagagatgagaatgccaaaggtcagtggcgttgggtggaccagacgccatttaacccacgcagagtattctggcataagaatgaacccgacaactctcagggagaaaactgtgttgttcttgtttataaccaagataaatgggcctggaatgatgttccttgtaactttgaagcaagtaggatttgtaaaatacctggaacaacattgaactagaaactcagaaagtggtccttgtgatggaaagagaaaagaaaaaccaattagaataaggcagaatgtacgtgcgtcattggaacacagaaaacatgctggttcatacagcgtttttagtcataatggtcttttttattttgtttgattcattcgagacaacatgtgtgtatgtgtgtgtgtgtgtgtgtagataatgtggtttttgtatggtgtttgatggaaggaataatctttctttgctttcttagtagtatttcaaggtgtttacttttcaattggtgtgcactgaatgcatgtatggaagaatagcgtgaataatgcaatctctttgtcatttttccccttctcagactcttagctcttaaaattcaaagatgggatattctaactggtagtggtgcatcatttttaacccaaatattgcaagcactttaaagatttgaaaccacatttttattgtttgatgtttcattttcagactttttaatgtcagtcattacaattacattgcatgaggaaaatttttccagaacaacagtgtggaatagttctgaattatgctgttctacagatagaaaaaaagtccaaatgcctttaaaaatttacttcttactccacccaacacgtttttgcaaagcaagaagtctttgtaagacaccttaaacaaagtccttcaattctacagcagaggaaataaaatcccccagaagccaaagggctcaccttcacattgttagttcatgacagacccaggtgtgcttcattagagataacatacattccctttggtatcacaggaagttactggggattactcgacctcattacttagctaacgactggataaaatttcttaattgtttgaagtaacattgtattcgtgtttgcattattaatttgaatagaaaataatcacattttcaacccatttatacaaattgttaatgtttctttagagctgtataactatagtttgaactagcaaggaagttattgttttgacaaccagaaattatgcttttctggtgcatgaaacattaattgcaaagggcagtcacatccaactttaataaaatatggtggtctttcttaaaaaaaaaaaaaaaaaaaaaaaaaaaaaaaaaaaaaa

SEQ ID NO: 826 - protein, 215 aa, Homo sapiens
MGLEKPQSKLEGGMHPQLIPSVIAVVFILLLSVCFIASCLVTHHNFSRCKRGTGVHKLEHHAKLKCIKEKSELKSAEGSTWNCCPIDWRAFQSNCYFPLTDNKTWAESERNCSGMGAHLMTISTEAEQNFIIQFLDRRLSYFLGLRDENAKGQWRWVDQTPFNPRRVFWHKNEPDNSQGENCVVLVYNQDKWAWNDVPCNFEASRICKIPGTTLN

SEQ ID NO: 827 - DNA, 2480 bp, Homo sapiens
  CDS (245)..(1387)
agtactaacatggactaatctgtgggagcagtttattccagtatcacccagggtgcagccacaccaggactgtgttgaagggtgttttttttcttttaaatgtaatacctcctcatcttttcttcttacacagtgtctgagaacatttacattatagataagtagtacatggtggataacttctacttttaggaggactactctcttctgacagtcctagactggtcttctacactaagacaccatgaaggagtatgtgctcctattattcctggctttgtgctctgccaaacccttctttagcccttcacacatcgcactgaagaatatgatgctgaaggatatggaagacacagatgatgatgatgatgatgatgatgatgatgatgatgatgatgaggacaactctctttttccaacaagagagccaagaagccatttttttccatttgatctgtttccaatgtgtccatttggatgtcagtgctattcacgagttgtacattgctcagatttaggtttgacctcagtcccaaccaacattccatttgatactcgaatgcttgatcttcaaaacaataaaattaaggaaatcaaagaaaatgattttaaaggactcacttcactttatggtctgatcctgaacaacaacaagctaacgaagattcacccaaaagcctttctaaccacaaagaagttgcgaaggctgtatctgtcccacaatcaactaagtgaaataccacttaatcttcccaaatcattagcagaactcagaattcatgaaaataaagttaagaaaatacaaaaggacacattcaaaggaatgaatgctttacacgttttggaaatgagtgcaaaccctcttgataataatgggatagagccaggggcatttgaaggggtgacggtgttccatatcagaattgcagaagcaaaactgacctcagttcctaaaggcttaccaccaactttattggagcttcacttagattataataaaatttcaacagtggaacttgaggattttaaacgatacaaagaactacaaaggctgggcctaggaaacaacaaaatcacagatatcgaaaatgggagtcttgctaacataccacgtgtgagagaaatacatttggaaaacaataaactaaaaaaaatcccttcaggattaccagagttgaaatacctccagataatcttccttcattctaattcaattgcaagagtgggagtaaatgacttctgtccaacagtgccaaagatgaagaaatctttatacagtgcaataagtttattcaacaacccggtgaaatactgggaaatgcaacctgcaacatttcgttgtgttttgagcagaatgagtgttcagcttgggaactttggaatgtaataattagtaattggtaatgtccatttaatataagattcaaaaatccctacatttggaatacttgaactctattaataatggtagtattatatatacaagcaaatatctattctcaagtggtaagtccactgacttattttatgacaagaaatttcaacggaattttgccaaactattgatacataagggttgagagaaacaagcatctattgcagtttctttttgcgtacaaatgatcttacataaatctcatgcttgaccattcctttcttcataacaaaaaagtaagatattcggtatttaacactttgttatcaagcatattttaaaaagaactgtactgtaaatggaatgcttgacttagcaaaatttgtgctctttcatttgctgttagaaaaacagaattaacaaagacagtaatgtgaagagtgcattacactattcttattctttagtaacttgggtagtactgtaatatttttaatcatcttaaagtatgatttgatataatcttattgaaattaccttatcatgtcttagagcccgtctttatgtttaaaactaatttcttaaaataaagccttcagtaaatgttcattaccaacttgataaatgctactcataagagctggtttggggctatagcatatgcttttttttttttaattattacctgatttaaaaatctctgtaaaaacgtgtagtgtttcataaaatctgtaactcgcattttaatgatccgctattataagcttttaatagcatgaaaattgttaggctatataacattgccacttcaactctaaggaatatttttgagatatccctttggaagaccttgcttggaagagcctggacactaacaattctacaccaaattgtctcttcaaatacgtatggactggataactctgagaaacacatctagtataactgaataagcagagcatcaaattaaacagacagaaaccgaaagctctatataaatgctcagagttctttatgtatttcttattggcattcaacatatgtaaaatcagaaaacagggaaattttcattaaaaatattggtttgaaataaaaaaaaaaaaaa

SEQ ID NO: 828 - protein, 380 aa, Homo sapiens
MKEYVLLLFLALCSAKPFFSPSHIALKNMMLKDMEDTDDDDDDDDDDDDDDEDNSLFPTREPRSHFFPFDLFPMCPFGCQCYSRVVHCSDLGLTSVPTNIPFDTRMLDLQNNKIKEIKENDFKGLTSLYGLILNNNKLTKIHPKAFLTTKKLRRLYLSHNQLSEIPLNLPKSLAELRIHENKVKKIQKDTFKGMNALHVLEMSANPLDNNGIEPGAFEGVTVFHIRIAEAKLTSVPKGLPPTLLELHLDYNKISTVELEDFKRYKELQRLGLGNNKITDIENGSLANIPRVREIHLENNKLKKIPSGLPELKYLQIIFLHSNSIARVGVNDFCPTVPKMKKSLYSAISLFNNPVKYWEMQPATFRCVLSRMSVQLGNFGM

SEQ ID NO: 829 - DNA, 3248 bp, Homo sapiens
  CDS (121)..(1737)
ctagaggcagctcagatagaggagctctttgggaagagacgccgggcaggcagaagcagcaggtaccccctccacatccctagggctctgtgatgtaggcagaggcccgtgggagtcagcatgccgcgtggctgggccgcccccttgctcctgctgctgctccagggaggctggggctgccccgacctcgtctgctacaccgattacctccagacggtcatctgcatcctggaaatgtggaacctccaccccagcacgctcacccttacctggcaagaccagtatgaagagctgaaggacgaggccacctcctgcagcctccacaggtcggcccacaatgccacgcatgccacctacacctgccacatggatgtattccacttcatggccgacgacattttcagtgtcaacatcacagaccagtctggcaactactcccaggagtgtggcagctttctcctggctgagagcatcaagccggctccccctttcaacgtgactgtgaccttctcaggacagtataatatctcctggcgctcagattacgaagaccctgccttctacatgctgaagggcaagcttcagtatgagctgcagtacaggaaccggggagacccctgggctgtgagtccgaggagaaagctgatctcagtggactcaagaagtgtctccctcctccccctggagttccgcaaagactcgagctatgagctgcaggtgcgggcagggcccatgcctggctcctcctaccaggggacctggagtgaatggagtgacccggtcatctttcagacccagtcagaggagttaaaggaaggctggaaccctcacctgctgcttctcctcctgcttgtcatagtcttcattcctgccttctggagcctgaagacccatccattgtggaggctatggaagaagatatgggccgtccccagccctgagcggttcttcatgcccctgtacaagggctgcagcggagacttcaagaaatgggtgggtgcacccttcactggctccagcctggagctgggaccctggagcccagaggtgccctccaccctggaggtgtacagctgccacccaccacggagcccggccaagaggctgcagctcacggagctacaagaaccagcagagctggtggagtctgacggtgtgcccaagcccagcttctggccgacagcccagaactcggggggctcagcttacagtgaggagagggatcggccatacggcctggtgtccattgacacagtgactgtgctagatgcagaggggccatgcacctggccctgcagctgtgaggatgacggctacccagccctggacctggatgctggcctggagcccagcccaggcctagaggacccactcttggatgcagggaccacagtcctgtcctgtggctgtgtctcagctggcagccctgggctaggagggcccctgggaagcctcctggacagactaaagccaccccttgcagatggggaggactgggctgggggactgccctggggtggccggtcacctggaggggtctcagagagtgaggcgggctcacccctggccggcctggatatggacacgtttgacagtggctttgtgggctctgactgcagcagccctgtggagtgtgacttcaccagccccggggacgaaggacccccccggagctacctccgccagtgggtggtcattcctccgccactttcgagccctggaccccaggccagctaatgaggctgactggatgtccagagctggccaggccactgggccctgagccagagacaaggtcacctgggctgtgatgtgaagacacctgcagcctttggtctcctggatgggcctttgagcctgatgtttacagtgtctgtgtgtgtgtgtgcatatgtgtgtgtgtgcatatgcatgtgtgtgtgtgtgtgtgtcttaggtgcgcagtggcatgtccacgtgtgtgtgtgattgcacgtgcctgtgggcctgggataatgcccatggtactccatgcattcacctgccctgtgcatgtctggactcacggagctcacccatgtgcacaagtgtgcacagtaaacgtgtttgtggtcaacagatgacaacagccgtcctccctcctagggtcttgtgttgcaagttggtccacagcatctccggggctttgtgggatcagggcattgcctgtgactgaggcggagcccagccctccagcgtctgcctccaggagctgcaagaagtccatattgttccttatcacctgccaacaggaagcgaaaggggatggagtgagcccatggtgacctcgggaatggcaattttttgggcggcccctggacgaaggtctgaatcccgactctgataccttctggctgtgctacctgagccaagtcgcctcccctctctgggctagagtttccttatccagacagtggggaaggcatgacacacctgggggaaattggcgatgtcacccgtgtacggtacgcagcccagagcagaccctcaataaacgtcagcttccttccttctgcggccagagccgaggcgggcgggggtgagaacatcaatcgtcagcgacagcctgggcacccgcggggccgtcccgcctgcagagggccactcgggggggtttccaggcttaaaatcagtccgtttcgtctcttggaaacagctccccaccaaccaagatttctttttctaacttctgctactaagtttttaaaaattccctttatgcacccaagagatatttattaaacaccaattacgtagcaggccatggctcatgggacccaccccccgtggcactcatggagggggctgcaggttggaactatgcagtgtgctccggccacacatcctgctgggccccctaccctgccccaattcaatcctgccaataaatcctgtcttatttgttcatcctggagaattgaagggaggtcaagttgtttgtcaatgatttgtcagagaacctgttgaaatgtgaattaagaagctaagaaaatatttcttagcaacattttctttttcttttttttttttttcttttgagacagagtctcactctcgtcgcccaggctggaatgcagtggtgcgatctcggctctctgcaacctctgtctcccgggttcaagcgatttcctgcgtcagccccagagtagctggaattacaggcacacaccaccacgcctggctaatttttgtatttttagtagagctggggccaccctggcccggccccg

SEQ ID NO: 830 - protein, 538 aa, Homo sapiens
MPRGWAAPLLLLLLQGGWGCPDLVCYTDYLQTVICILEMWNLHPSTLTLTWQDQYEELKDEATSCSLHRSAHNATHATYTCHMDVFHFMADDIFSVNITDQSGNYSQECGSFLLAESIKPAPPFNVTVTFSGQYNISWRSDYEDPAFYMLKGKLQYELQYRNRGDPWAVSPRRKLISVDSRSVSLLPLEFRKDSSYELQVRAGPMPGSSYQGTWSEWSDPVIFQTQSEELKEGWNPHLLLLLLLVIVFIPAFWSLKTHPLWRLWKKIWAVPSPERFFMPLYKGCSGDFKKWVGAPFTGSSLELGPWSPEVPSTLEVYSCHPPRSPAKRLQLTELQEPAELVESDGVPKPSFWPTAQNSGGSAYSEERDRPYGLVSIDTVTVLDAEGPCTWPCSCEDDGYPALDLDAGLEPSPGLEDPLLDAGTTVLSCGCVSAGSPGLGGPLGSLLDRLKPPLADGEDWAGGLPWGGRSPGGVSESEAGSPLAGLDMDTFDSGFVGSDCSSPVECDFTSPGDEGPPRSYLRQWVVIPPPLSSPGPQAS

SEQ ID NO: 831 - DNA, 7477 bp, Homo sapiens
  CDS (1)..(5229)
atgtggccggccggcgcgggcaccaagctgccctgtccccgagactctgcgctccggcgggcggctttctctgggaacctcacggccctgccctctcacctcgtgcccgccggccgcagcgtccgggtcttcatcagcgccaaccctgaagatacgggagcagaaagacaggcgctaagagaaaatgtatatcctaaactgagagaattctgcagagaaaactatggattggaatttcaggtcatagatctgtactggggagtggaagaagatgagtgggacagcccagagctccagaagacccgcatgaagctgctggagaattgcttgaaaacttctgcaggtccatgttttgttggactattaggtgaaaaatatgggaatatccgaatccctggagaagttgaagcctcagagtttgaaatgattttggatgccgccatagaggcaaagctggagaccaagttgctggaggagtggtactgtcgagatgagaactcggtgccagcagcctattacctcagacccaagtcagaaatgctgagaagcaatagaaatgcaatgcagccttctaccaatgctgaaaacgagaagacatggcaagagatatcagatgagatcaagaagatatttaaggctgctgtaaagctgttacacgaaaagggtaaaatgaaacacagccaggctaagaggtacctgttctcagctatagaggatgagtttgactttgctctgggaaaacaaactccagcatttctaaagaagtgtgtttgctacattaggaaaattgctaacattgagcgctttgtgaaaatcccagagatgggaaaatacatggatataactggaacagaaccgaggattattcgggacccagaagcccaagagaagctgataaaactcagggatgaatttattcctactattgttgcatcatctaatctgagagtgtacacatctgttactcattgtgacatgaaactaggctactcccaagaaatagaaaatcattacatcgaaggacttggtaaacaattttatgaggacatgattgatataattcaggcaacgatacaacagaattttgacactgaaactgatacactctatgatgaaatccttcaacattcatcattatgtaaaacatacgcctccttctatgagtacaaatgtgaatctctaaacatagtgcataactacattcttccaagcaaagctggacacatcaaccctcttattatatatggtgggccatgcactgggaagacccttctgctagctgaagtagcaaagaaggcttatggctggctacatgaggacacaggaccagaatctgacccagtagtcatcgtgagatttctaggaacgacagacatgagctctgaccttaggactctccttctaagtgtttgtgaacaattggcagttaactaccggtgtctggttcaaagctaccctaagaagatccatgacctctgtgacttatttataaatcttttgaatgagtcttcactgcagagacctctagtcataatattcgatgcactagagcagctctcagagaatgatgatgccaggaagctttggtggctcccagctcacctgccccgctttgtccggatagtcctttccacgctgcccaacaaacatgggatcttgcagaaactaaggtgccttatccatgaagaagacaactacatcgagctgattccccgagacaggaagatgtgcagccaggtcctcaaacaccagctgctgcgcgtcaaaaggaaggtcacatcaggccagcagatttatgtgaacaatgcattatccaagtgcacactgccaatgtttgtgaacctgaccttcagggaggtgaggcactggagatctcacaaagacgtcgatgaatcctccctctctgtcaccgttcatgaaagtatagagcagttattctggtccttggagaagaagtgtggtcagaaactggtctctagggctcttggttacatcaccatggccaaaatgggtctgagtgaaatggaactggaggatgtgttagccctagacaacagtgtaatgagtgagctcaaagaaaacaccagacccagcaatcccctgagagtaccttacttgtacattgcaaggctcaaggagggtctcagtggatacctaatagaaagacatgtgaaaaatgtcacactcctagtctgggccaacagacacctgcagctcatagcccagaagctatatctgcaggatgacaatgacctgcgtgaaatgcacaccatcttagcagattattttctgggggtttggtcagggggcaggaggaaagccttctgccttgaggacccctacttgaatggctgccttgacttggagaacagaagtttgctggaggaagaaaagcacttcatggaacaggcttcctttgacaggcaggctccagaccagccctgggttttccagtgtaatcccctggaacctgacatctttttcgttaatcatcggaaaatgtctgagctgttgtaccacttgacgaggtgtggaaaaaccgatgacctgctttacggcatcatcatgaacttcagctggctttataccatgatcaaaattggccagtttgacaaagtgctttcagacattgagctggcttacaactactcgcaagagaaggagctgaagttcctggccaacaccctccgcagcatcaaaaacaaggtcactgcatttcccggctccctttcagcagagcttcagcaaagactgctgcctgttgtaagctccctgcccaaacttagacatcttcttttagagtgtgataaagatgggcccaaatattgctccattgtaccactgcattcatccatggatgtgacatacagcccagagcgtcttcccttatcatccagtcacctgcatgtcacagagatcctgcctacctgtaaccccagcactgtcctcacagctttagaaaatggttccatcagcacctgggatgtagagactcgacagctactcaggcaaatcaccacagcccagtctgtcatcctgggcatgaaactcaccagtgatgaaaagtaccttgtggtggctacaacaaataacaccttgttgatttatgacaatgtcaattcttgcctcctgtctgaagtagaaatcaaggggaccaagcatggaagcagcgccacctacatcaatggatttacactgtccgccaaccacgcccttgcatggctcgaagccagcaaagatgtcactgtcatcgatctgctgtacggatggccgctttaccagttccactgctggtatgaagtgacgtgcgtccagtgctccctggatggtctgtatgctttctgtggccaatacctgaacacaaccaccatatttcatttagggagtggagaaaagttatgtacagtgacatcagaattttcaggtggatttgtgaagtttcttcttatcttggacacagctcaggaaatggtcatggtagacagtgaaggaagtctttctgtttggaatactgaggacatttccagcccccagctgactgatgactttgattgccgaagagaagacagtgaggtggtcagcattgagctttcagaagaccaaagtgcagttctgatctgtaaagccctcagcattgagctcttagatactggtctgtggaaggtggctgaaaagttcagagccaagcacaacgaacgctttatatctgccgtgctgtctaaaaatggagattgtatcatcgccaccatggaaaatacctcagctgtgtttttttggaggcgggacacaggacagtgtatggcaagcttgcaggaaatctcaggttccattgttaagttagtgaaatccagtcaccacaatatgctactgtctttatcaaccagtggtgttctttccatttgggacatagatataatcacagctatgtccaacatagataagactggaaaacccatccaaagtctgttgttgcctgctagaggggaaatcatttactccctggatggatccgattgtgttcataagtggaacttcagcagtggcttcatcgaagcagtattcaagcatgaaggaatagttgaacactgtgtgttaacatccaccggagatataatggtgacatcagatgacaaaagcagccagtatgtctggcacaccagcagtggtgaaaacctttttcgaattaacgggcagagaatatctcagctgctgattacacacaatgaccagtttgtggtctcgctctgtgaggaaaatgcctccagggtttggaggctcgccacaggccacagggtctgcaacattctgaccactttgcagaatgcctttattacctccgcaaataccttcgtggtgggaatgactaaaagcaaagtgttggcagtcagtctttggacaggaagtatcaccaagaaattttgctgtgaagatgggaccaccatcgtgaattttaaattaatccctgactgtcctgatatcatcgtgtttatcacatcggccgagactgtgaacatctggagtctgacagatgaagtgatctgtcggcgcgtgcaacttccaaacaacttcttgaaaaatctggaggactttgaaatttctcccaatggaaagctaggcattatagccaggggagatgaaaacatcaatgtgctagatttatacagtggtaaattgcgggtggttcacgcctctgggatcatctggcggcagaggttgtctcgggatggtcgctacctggtatacatttgtttccgaaatggggaggaggaggatgaaaatggtgcaatattcagtttaattgtaatgagactggcagatggcaaaaatatcggtgcttgttccctttacaaaacaccaactttccttgcactctcccagaggcacctgaacatcattgtgggctttgatgatgggagtatagggatctacacggtagtagaccgtgtagatgctgcactgaaaatcaaaattgccacttcaaatagcagacaaattttcaacaatgcaacacacacctccaggccaaagtgtaacagttattgttttaaaatatctgtggattgcttatggagagagtccactgaggtctttgcaagagacagccccatcacagttagtgactctactgagtccaatgaagcaacaccctccaagaaacacaactcttgttatgagcgggtatgctcggccctagaagccaggggccacagctatgcccctgataactgacaaaatgttttccagctaagcagaaatatgtgatccacgtacagaagggaaaaaaatgtgccccaaatgataaactattcatttattaaaaggcaggagcgatgctggaattccagtgttttattaagatgttcatgaaatggacaaataggttagtcttgggtgtggtctttttgtcaaagtgtatccagaatgtcagaatttctagtagtaatatttaaatggttacttcatctgaaaggcagaggctaaaagtttttaaattagctgtgtggtgaggcagcataatacatcccactggttaagatgagagaggctagagttatatacagatcatttggatgggaattagttctacaaaaatcagctgaaatcatgaagacaaagagctgcttgacttcaaatgattgtgtgataagtaaacacagccttaatctctctttacattttacagtcctgacaactgtgtacacctagtctgcagtgaacggtctaaaggtgcaaaatatgtaacaaaaatacccaagtgtattcccagtttcccgagagatatgacctgaaacatgagactgtggactggactgggacaagaactaactaccactatcatagggctactgaacatggagagtcagtctttattaaaagacagttgcaacaattgcatgcgagggtttctgtataacagaatatatgatttttaaactatttcctgggttgcaaaagaacacatttagtaagaaacaacaatcttttcgcatctttttgaaatgcatatttgtgctgggtgtaaagaagattacaggaagggcattacaaatctggtcaaaacacctgtccatttccatcattgtactaacagaagtctgtactatttggtcagtttgtatggaagcataaatattccctaaattcctgcagttagtcttcatagaaagcaagctttctcaacatgccatctctgagatactgatgacgtttgccttactcacattccttctctttcctgtgtaaaatgcagatagatgaccaaatactctgggataaactgaatatgcctgtctttgtgctaaaatattccataaatcttaagggtgtccaaaagttctttattgtccttgtttgtaatcactttcttacttctacacaccatctgtatgcttctttatctgttactcttcctgattgaggactcttctgagccttttatagtcctatccatttcaaagcagaagctgtggaatggtattaaatattttttaaaattaattcacctgtttaaaagaaaacattgcatctcaaaaggtgaagatgattgttctttcttccatatcctccttacggcatgtccttggataacttttcaaaaggtatccacacttttggttgagtttagttttcttagaaagtagagaagtaacactttactagaataatgaacaaggaattgatttgctctaggcccagctctgccataaactcattgtgtattcctagacaggtctttaacttcatcagtgtgttgtttttgtgaagtgcaaaataaagatagtgatagtttctgctgtagccctcatagggacattgggaagcagtataagaaaaacttcagcaacatcatgattattgatgctaataggaaaaataaattcatgtaacccatagagaatccaggtcaattgtatttcctcttggaaagcagtttaacatgtaagcgttcaaagatgtgattcagataaaaatacccaggtccatagtgaaagatgtttttcagtatgttacttatggtttagctactagccagggaggtggtagcccagagaaggcaaaccacatacagatcacctggagttgattatatgagtctatgcttttgagctctttaggcaacacattctcattcctgtcattatcagttgaacctccatgccacacatttctaagaattaaatgcctagatggattaaatgtagtatgtgaatgttctatgtaaaagccaatagagtatacaagtgacttgaatgatttttcctaacttgtttgcaactgatagctcatattgaatgtttttatgtaaactttgtatcgttgggaagaattacccaatcagagatttatattttcataaatgttacatttagttaaattttgttacagagttgttacactagaaaattatttcagtcttcaaacaatatacagtcttgtgtatgtattatttgtatgaataaaagataaactacttaga

SEQ ID NO: 832 - protein, 1742 aa, Homo sapiens
MWPAGAGTKLPCPRDSALRRAAFSGNLTALPSHLVPAGRSVRVFISANPEDTGAERQALRENVYPKLREFCRENYGLEFQVIDLYWGVEEDEWDSPELQKTRMKLLENCLKTSAGPCFVGLLGEKYGNIRIPGEVEASEFEMILDAAIEAKLETKLLEEWYCRDENSVPAAYYLRPKSEMLRSNRNAMQPSTNAENEKTWQEISDEIKKIFKAAVKLLHEKGKMKHSQAKRYLFSAIEDEFDFALGKQTPAFLKKCVCYIRKIANIERFVKIPEMGKYMDITGTEPRIIRDPEAQEKLIKLRDEFIPTIVASSNLRVYTSVTHCDMKLGYSQEIENHYIEGLGKQFYEDMIDIIQATIQQNFDTETDTLYDEILQHSSLCKTYASFYEYKCESLNIVHNYILPSKAGHINPLIIYGGPCTGKTLLLAEVAKKAYGWLHEDTGPESDPVVIVRFLGTTDMSSDLRTLLLSVCEQLAVNYRCLVQSYPKKIHDLCDLFINLLNESSLQRPLVIIFDALEQLSENDDARKLWWLPAHLPRFVRIVLSTLPNKHGILQKLRCLIHEEDNYIELIPRDRKMCSQVLKHQLLRVKRKVTSGQQIYVNNALSKCTLPMFVNLTFREVRHWRSHKDVDESSLSVTVHESIEQLFWSLEKKCGQKLVSRALGYITMAKMGLSEMELEDVLALDNSVMSELKENTRPSNPLRVPYLYIARLKEGLSGYLIERHVKNVTLLVWANRHLQLIAQKLYLQDDNDLREMHTILADYFLGVWSGGRRKAFCLEDPYLNGCLDLENRSLLEEEKHFMEQASFDRQAPDQPWVFQCNPLEPDIFFVNHRKMSELLYHLTRCGKTDDLLYGIIMNFSWLYTMIKIGQFDKVLSDIELAYNYSQEKELKFLANTLRSIKNKVTAFPGSLSAELQQRLLPVVSSLPKLRHLLLECDKDGPKYCSIVPLHSSMDVTYSPERLPLSSSHLHVTEILPTCNPSTVLTALENGSISTWDVETRQLLRQITTAQSVILGMKLTSDEKYLVVATTNNTLLIYDNVNSCLLSEVEIKGTKHGSSATYINGFTLSANHALAWLEASKDVTVIDLLYGWPLYQFHCWYEVTCVQCSLDGLYAFCGQYLNTTTIFHLGSGEKLCTVTSEFSGGFVKFLLILDTAQEMVMVDSEGSLSVWNTEDISSPQLTDDFDCRREDSEVVSIELSEDQSAVLICKALSIELLDTGLWKVAEKFRAKHNERFISAVLSKNGDCIIATMENTSAVFFWRRDTGQCMASLQEISGSIVKLVKSSHHNMLLSLSTSGVLSIWDIDIITAMSNIDKTGKPIQSLLLPARGEIIYSLDGSDCVHKWNFSSGFIEAVFKHEGIVEHCVLTSTGDIMVTSDDKSSQYVWHTSSGENLFRINGQRISQLLITHNDQFVVSLCEENASRVWRLATGHRVCNILTTLQNAFITSANTFVVGMTKSKVLAVSLWTGSITKKFCCEDGTTIVNFKLIPDCPDIIVFITSAETVNIWSLTDEVICRRVQLPNNFLKNLEDFEISPNGKLGIIARGDENINVLDLYSGKLRVVHASGIIWRQRLSRDGRYLVYICFRNGEEEDENGAIFSLIVMRLADGKNIGACSLYKTPTFLALSQRHLNIIVGFDDGSIGIYTVVDRVDAALKIKIATSNSRQIFNNATHTSRPKCNSYCFKISVDCLWRESTEVFARDSPITVSDSTESNEATPSKKHNSCYERVCSALEARGHSYAPDN

SEQ ID NO: 833 - DNA, 1184 bp, Homo sapiens
  CDS (37)..(840)
gggcgcttcttccgggtggggccccgggccgaggcgatggcgccctgggcgctcctcagccctggggtcctggtgcggaccgggcacaccgtgctgacctggggaatcacgctggtgctcttcctgcacgataccgagctgcggcaatgggaggagcagggggagctgctcctgcccctcaccttcctgctcctggtgctgggctccctgctgctctacctcgctgtgtcactcatggaccctggctacgtgaatgtgcagccccagcctcaggaggagctcaaagaggagcagacagccatggttcctccagccatccctcttcggcgctgcagatactgcctggtgctgcagcccctgagggctcggcactgccgtgagtgccgccgttgcgtccgccgctacgaccaccactgcccctggatggagaactgtgtgggagagcgcaaccacccactctttgtggtctacctggcgctgcagctggtggtgcttctgtggggcctgtacctggcatggtcaggcctccggttcttccagccctggggtctgtggttgcggtccagcgggctcctgttcgccaccttcctgctgctgtccctcttctcgttggtggccagcctgctcctcgtctcgcacctctacctggtggccagcaacaccaccacctgggaattcatctcctcacaccgcatcgcctatctccgccagcgccccagcaaccccttcgaccgaggcctgacccgcaacctggcccacttcttctgtggatggccctcagggtcctgggagaccctctgggctgaggaggaggaagagggcagcagcccagctgtttagggttgctggaggccgggctaccgtcttgtgcctgaaaaccacggggcctgtccccagctggggtgagcgctcagagggcctggggccctcactcctgcccacgcctcccagaccccagaacggagcttcaagtcagacagatccctgccttggtgggcagttctgccttccaaggaagaaggggaagaaaaggacctgtgggtggctcaggcccaagcagaccccgggctccaccccagccccgcccaggctgctgccagtgcacacttttacaaatttaatataaagcaagtccagtcttaaaaagacaaaaaaaaaaaaaaaaaaaaaaaaaaaaaaaaaaa

SEQ ID NO: 834 - protein, 267 aa, Homo sapiens
MAPWALLSPGVLVRTGHTVLTWGITLVLFLHDTELRQWEEQGELLLPLTFLLLVLGSLLLYLAVSLMDPGYVNVQPQPQEELKEEQTAMVPPAIPLRRCRYCLVLQPLRARHCRECRRCVRRYDHHCPWMENCVGERNHPLFVVYLALQLVVLLWGLYLAWSGLRFFQPWGLWLRSSGLLFATFLLLSLFSLVASLLLVSHLYLVASNTTTWEFISSHRIAYLRQRPSNPFDRGLTRNLAHFFCGWPSGSWETLWAEEEEEGSSPAV

SEQ ID NO: 835 - DNA, 2033 bp, Homo sapiens
aaatagaagattgtggatccctgggaacgcagagcaggaatgcgtggcaggaaggaatctcccagggattcacagttcacccctaaatcaatccgtggggcccgaggggcaaagtatctgagtgacccagccctcagtcttgtgtccgttcctgagaaggagctcagccttgcccctcaggagctgcatgtaccaaataccacagatggaggcgtgacacagactgtccactgcagagaccatggacggaggcagcctccgagccagcccagcagccatggacggaggagccttggagccagcccagcagctctcctcactggaggggtggacgggacaggaccggctgctcattccacgctggagggaggccaggagtctcagctggatgcagtcacctgacctggagagttcaaagtgcctaacacagggatgctgctacccacaagcctggatcctggcgtgctccgcggctctccttcaagccctggcctcatcagacctccaaggctccctagacagggttaattattcacgtggcctgggacccagggttcgtttgtttgtttttcccgacacagtagggtccacgaggaagtcaggatccaccggcaatatttgcagtgttatgttgaatgtggcaactggctgcgtgaggatagagaagtaaacagcatgtccggtggcagtcggttaccacacagaatttaggaggcccagtgaaatgcaaatgctaggtaagtgacacgtaagtttttgatataagcatatcccaggcaacatttatttattggaaattgaaactcacatttaaccggccatattattttttttaaatttttttgttctctaaatctatcttttgtttgccgaatttctagcaaccttagatggagaggtggctctgagattagcatccccacaggcccacctctggctggagagacaaagggaggtggggtgctgccggggagggagagccaaggtctacttccacgccgctcccagacctggggccagaggcccgcttgctgggggctggggctcagaggggagcgagcggctgctgtcaggctgtctgaaaatgctgtgcggattccccgattttctctcgcctggcaggtcacctggcccacactctcctcccctgatcccctgagtgctcccctccccctgcaggtccccctcccctctgggtgagcctggatgccagcaccctgttccgcccgcccagcatgcagaacaaaagcacaacgcacagaaacacagccggtgcgcgcagggcggcaggctggcttctccctccctcctgccgaggtctccggccccttcccccttccctccttccctcccctctcctcttctattagaaaatgggagtgttagggttgaattgtgtccccccaaaacaggtatgttggggtcctgattcccagtcccctagaatgtgaccgtgcttggagataagacctttacagagtaactgattaaaatgaggtcattagcagggaccctagtgcagcatgactggtgtcctttcaaaaaggagaaatttggatacagacatagacacacactgagggaaggtgaagtaaaggggcaaggagaagacggcctgcaacgggagtgacgcccttacaagccgagggacgcctggcagtgccagctgacaccaggagcagggagaggccaggaagcctggcagtgccagctgacaccaggagcagggagaggcctggaacggttctccctggagacatccgggacacaccttgatttcaggattccatgatagcttccagaactgccaaagaacgcatttctgtgttttcagccacccagtctgtggtatcttgtgactgccgccctaggaaagtaaaacaaggagttaattcatgaagggtgggggaaatacgtaccctttgaaataccacctagaggaaggggtaatagtacacccgatcatgtgctccagtttatgaaatagttgcacgtcactcggaattttgaaaaacaatatattttcaggactc

SEQ ID NO: 836 - DNA, 1741 bp, Homo sapiens
gagtgcacctggcctgagagcccgccaggccctgcccctgctcggctcctcgtctgctgaagctcgggacctctagccagtggccctctgcagccacggggaatggggctgagagccggttcccgctgcagggcagaccacctagctcagccgcagccacagggacatctggccccggttctgagatgtggggagtgctggcgggctcgggggttgcctggaggctgctgcctgcacacagaaggcggatgcagcttgggtgcccaggcgggctggaggacagcgggctgggaagccaggggccgccgggacctggggctggaaaccacatctgcccacagccgcagcctcctgcacctgtcatcctggcggcgccctgacgtcggagaagcagcaggcgcggagctcctgcagcgggcaccgctgcagcaacccgacccggcgcaggcggcagtggaaggcggcctgctagcacggctcccgcggccccaggaccaggggtgcggccagcaccgccctcactccccgcgtctcgtggatattgccctccctggaggcggctggacctaagcgaggctcgcagcgatcggccccgcgaagactcgcatgcagggctcaggatcccgcattctggcgccgcggcaccgcacctttcagcagccctgctcctcttcttgttggtaaacttttgtcactctgccatgaaaagcatccaggcgtccttgatttcgacattgcgtgcacgctcagccgagctcatcagacgggcggttgtccccagagcccgcgggtagcttgttcccgggcggcggctcctgctggatgcagctccttgtgggcctaccaggcttggtggagccacagcagacctgtggagaggaagagtaaggcgggctctgcagggcagtgggccgggaccatgagagaggcgggtcagtctgggctccaagctcagcctctcggattccccgggacccacggcttataatgcgcttaaatcccacgcctcgcccgagagacagcacgtcaccgtcaccgtcaccgcctagcgcccctgacccgctcccactccgctgcagcggagggtgtgtgagggagagggacgcagggagggaaaagcgttgggagggcaaacatcttttcataagcttttccccttctatatgccatctctgatgggagcctctttagatctttcgtccatttactaattgggttgttcgatttcttattgttgagttgtaagtggtttttaatggtctggatgccagacaggtgttttgcaaatattttctccgtctgtggcttgtttctccattctcttatttcctttcccagagcaaaagtttttaattgtaacgacttcataccaatatcttctttcatggtagaaatttgtcttttatgtactttactgttgtatctacaaagtaattgccaaacccaaagttacctaaatatcccttttgttattttacagaagttttacagcttttggatttaaatttaggtctaaaaattgaattcataaaagtagagagtataatgatgcttaccagaggctgtgttgctggggagaaaaatgggaagttgttcacagatgcaaagattcagttaaaccggagaaatgcgttttgaaatctattgcacagcaggatgactatagtcaataataatgtactgtatatttaaataacaaaaagtaaatttcaaatatctaaccacaaaaaaaaaaaaaaaa

SEQ ID NO: 837 - DNA, 1384 bp, Homo sapiens
gtcggttgtagtggcctcgccgcccggtccgctgtcgcagcgctcatccgcgccgggagcccttggctgcgtcgcccggcagccgcgtaaagacgctgcgaattgacgccttttataataaagacacttatcttgcccaagagctgggctggagtgtagtggcgcaatcttggatcaccacaacctccgtctcccaggttcaagcgattctcccgcctcagcctcctgagtagcaattacaggtaaaggttgtggccagaaagcacgggcagcctgggactcctgttgccatagcaacccagctaccgccgaggacttctgcggcttttccagcccagcagcagccgctccagcaaatacatatggggactccagtacctggagatgtgaattccataaaaatggaagcatctaagaggcagtgaacactggcgcccacaggagaaccaggtgcatcagcgcattgcggagctgaggaaagcaggtctgtggtcccagaggcgtctgctgaagctgcaggaggcccacgacccaagtcccactgggactatctgctggaggagatgcagtggatggccacagactttgcccaggagaggtggaaggtggcctctgtgaagaagatggtcagagctgtggcccggcagctgcaggacaggacgcgcagggaggccggggccaggagggaggagccgagcaggctgaggcagacgtcacctgtactaccagagaaatcgagcgtccctggtctagtactgcgcaggtaaagattccagcatcttggaagcaagtgctccactggaaaataaaagccacgtggagcacttgattagactccagaaacagaaactgcagctgctcccaccacccccaccaccacaggccctgcccggggcacagccaaccacacaagtgcaagtgcagccatcacccgcctaccacagcagagcccccagctcaccacagtcacggccccgagacccagagccctgttgatgggcaccaccatggccaacctccagactcgagtttccacctcccacctgcaaggcccaagactgacgtcagcgctgacgtaccagatggcccaggttgctgtggccacgccccctgtggtgtctgtcctggcagttgtggtgctgtcagccagggtcacagtgcttccatcaacgcaacgggatcagtgttgtgataaggcagctgcaaaaagcggcaggtaggcagccaccttcgcctcaccaaactcgaaacaactcacttgagtgagttgcatcaaacctttctaaatttctcattctagaagttgctgagttgttctgccatgtgttaacttttttttcttatcagtaaaatcttttatttggttaaaaaaaaaaaaaaaaaa

SEQ ID NO: 838 - DNA, 1296 bp, Homo sapiens
gtgaaagagcaggttctgcttctttggtgtagtcctgaagcttcctaagaaacttcacatcaggtgatggataggagcaaccctgtaaaaccagccttagactatttttcaaacaggctggtgaattaccagatctccgtcaagtgcagtaaccagttcaagttggaagtgtgtcttttgaatgcagaaaacaaagtcgtggacaaccaggctgggacccagggccagctgaaggtgctgggtgccaacctctggtggccgtacctgatgcacgaacaccccgcctacctgtactcgtgggaggatggtgattgctcacaccaaagccttggacccctcccagcctgtgacctttgtgaccaactccacctacgcagcagacaagggggctctgtatgtggatgtgatccgtgtgaacagctactactcttggtatcgcaactacgggcacctggagttgattcagctgcagctggccgcccagtttgagaattggtgtaagacatcacaatcccattattcagagcgcgtatggagtggaaacgcttgtagggcttcaccaggtaagcggtgttgaactttctgcttgtgtattctctctgggcagagatgccacttgcctcccccaccatgccatctctgaagaatattacagaccattttggagcatggtgaataagaaattttcaccttaggagttcagttgaatagtcatttttatatttgtgactgcaagtcactcttaggggctgtacttccttagtactggtagcattattatccaatggacttttatagctttcattaggttttcttttgtttttgttctttaaagaacgttttacttatcttagtatttcatttttcatctatattatgaggcagtaagagtcttctgtttttccaaagttgagactgctttatatttatttcgtattgtctacagctgtagtgttcaatacattagccactagccacatgtggttatttaaataagataaaataaaaattggccgggcgtggtggctcacgccggtaatcccagcactttgggaggccgaggcgggcagatcattaggtcaggagatcgagaccatccttactaagacggtgaacccccatctctattaaaaatacaaaaaattagccgggcgtggtggcgggcgcctgcagtcccagctactcaggaggctgaggcaggagaatggcgtgaacctgggaggcagagtttgcagtgagccgagatggcgccactgcactccagcctgggggacagagcgagactccatctcaaaa

SEQ ID NO: 839 - DNA, 700 bp, Homo sapiens
ctcctgcttcagcctcctgagtagctgggattacgggcacctgccaccacacccagctaatttctgtatttttacaaaaatttggactctgcttagattggcttagttttctctttagtcaaatcttcaggaaccaatttattaccattaaaaatgatctaacaagctttatttttattattgttaaaaatcctcattttgaggaacacaaccacaaagtaaagaatgttttcattgatttaaccagtaaaaatcaatatttaattataaaattttttttttcttcagctaaaacagcggaagaggtgatttattatatggttgttacactcggccacaaataaacacagaaatagtccagaatgtcacaggtccagggcagaggaccaacatgggcattttgtttatgagcaaggtgggtctcagaggtgatcggcgatcagagggcgatgaagttctagatccattgagacaagctctagacagtagcatgcagtcccacaacttgtaccagcatccccagcatctggcattccatgtttctgctcctgtggcctccacagtgcaacaagctagcggtttacttggacctctacctcatctttcttcttttgcgcttcagcctgcgcattcgcttcttcctccacttggctctcatggtgcaggtttccaagaaaatggcgctaaggccgagagttaa

SEQ ID NO: 840 - DNA, 2440 bp, Homo sapiens
atggcagtgctggaggaagaattcacgttgtcttcagtagtcctgagcgcggggcctgaaggactcctaggcatgaagcagagtgacaaaacagaccagtttctagtgacagacagtggcagaaccgtgatcctctataaggtttctgatcagaaacccttggggagctggtcagtgaaacagggtcaaattgtaacatgtccagctgtgtgcaactttcaaactggagagtatattgttgtacacaataataagattttaagaatctggaataatgaagatgtaaacctggataaagtatttaaagctacattgtcagttgaagtatataggaaactttcagtgcaagggtcagaacccttggtgctcttcaaggaaggtgttcgtggtttagaggcctcgcttgcaggcccccagcagaaaattgaagctgttatctctgatgaagtgattaaatggacaaagtttttcatagtattcagacatcctgttttaatttttattactgaaaaacatggaaatcactttgcttatgtgcaaatgtttaactcacgtatcttaaccaaatatacactcttagttggacaagacaaaaactattttatagagagttttactgcattggtagatcagaaattcatctctttgacgtcattaagctctgatggttgtatatatgaaaccttgatgccaatacgtccaactgacccagaaaaaaatcagagcttagttagatcactgttgctcaaggctgttgtgtctggtaacacttgaaatggagttgcactcactgcgctggatcaggatcacgtcacagtcctaggaagtccactagcagcttctaaggaatgcctctctgtatggaacataaaatttcaaacactacagacttcaaaagagttaccacaagggaccagtggtcaactctggtattatggggaaaatgtgtttatgctacgtggaaaatctctgtgattccatacaactgtgaagtgtcatcattagcaggtgctcatggaaaactcaagcatagtcaagatccaggaactcatgtcgtgccccattttgtaaactgggaaacacctcaaggatgtggacttgggtcccagaactcagagcagtcaagaagaattttaaggagacgaaaaattgaagtgagtttacagccagaggtatcaccatccaaacaacttttgtcaaccataatgaaagattcagagaaacatactgaagtagaagtatggaaatttttggctctgaagcagacccctgactttcatactgtcactggggacacagtaacaggacttctggaaaggtgtaaagcagaaccatcattttatccccggaactgtctgatgcaccttatccaaatgcatgtgctttcttacagtttgtgccctgacttaatggagattgccttaaaaaagaaagatgtacagttgttacaactctgtctacagcagttccctgacattcctgaatcggtcacctgtgcttgcttacaaattttcttgagaattggtgatgacagtattcaagaaacagatgtcagtatggagtcagtttttgactatagtaattctgtacatgatgagaaaatggaagagcaaactggaattcttcaaaatggcttcaatcctgaagaagataaatacagtaactgtgatcaagagttaaataaaaagccccaggacaagacaaaggagaccatttcatgctctgtgataccaaaaagagcagctctacttaatgcaattcttcattcagcatatagcgaaacatttcttctgcctcatttgaaaaacatcccagcacagcatatcacactgtttctcaagtgtttgtgtttcctttatctgaagtgtagcgaaaatgctactatgactcttcctggaatacacccacctaccttgaaccagattatggattggatatgtctacttctggatgcaaattttactgttgtagcaatgatgccagaagcaaagaggccactgataaatctttacaagcttgtaaaatctcagatatctgtttattccaagctcaacaagattgaagtaagtttttgggagctacagaaattaaatcaagaaaagaataacagaggattatattcaattgaagtgctggagctcttctgatattaccaattctccttcatagtcattttataaagctcttttatgtaactcttgcttcatccaggcaagagtggtgttttgtttgcgaccctctcggtgtcaagagaaacatgtcagtgagtacctggaccatcacttattgatgctccggggtagaactgcaggtttcacatgaacctattctaggttgtggacattggtgtgcagaggttctgcaattttttaaaaatatgtaactgggttgattttaagtaaaattatttgtgtattgataaaagtctaatttcttatca

SEQ ID NO: 841 - DNA, 852 bp, Homo sapiens
gaatttgctctctgcctcactgcctgagctggaacatttgtcttctgtcctcagactgggctttaccccatctactcccaggatactcagaccttcagactctggctgaattataacactgactttcctgggtctccagcttgcaaatggcaggctatggaacttctcagcccacaatcacccttcagggtagaccgaggagagcacctccccttcctggtgaagggagcccgatacacgctggtgccggctggccaagaaggaggtggacaaacctggcgaccgctccctggcaccacctcaccagaggacagctcacacctccacaggggtcagaagaaaggagctgccctggggatggctgtgtatccctacaactgccaggcacatgccccttgaacacccgatgctacgtgtcccaaaggaaactggtctccacccacccccggcccgtcctcgtcctgggtaccccaccttagtaaatggcgccaccatctgcccggtcactcagcgagaaactcaactcctggcagcagatgacgggcactctggttaaatgactctctccagcctccaagttcaacctgcagggaagccctggaaatcctgtctccctctgccctgcctctccttcagctccgaaccccaccccactcagtacatggccccccaacaggctttcaaatgtctgccttccccaaaccaatctgtggttttaaaagaagtaaggtcaggtacagtagctcatgcctgtaatcccagcactttgggaggccgaggcaggcggatcacctgaggtcaggagtttgagaccagtctggccaacatggcgaaaccccgtctctactaaaa

SEQ ID NO: 842 - DNA, 3350 bp, Homo sapiens
gtgccactgctcaaggtctccatggctgagcctgggggctcttacaacaggctccatgcccaaggtggcagttgtggaaccatcagagagggcacagagctcatggtttatggtgtaggggctgggagcttggagggggttgtgtggggggctggactcaggcggccagaggcctgggaacatcatcctgggcacgccgtacctgtcacgcagtctgagtcatgctgccagggcaggtatccagctcccagcctgggagtgccaagagccaaatccacggcagattaggggtgatagtcacggtcccacgtcctctatctgtcagcaatccagtggtgatctaggataaaagcctgagagtcctatacacgcggtcatcccacaacacacttcataggccatggaaggacacacagcccccttccctccctcccaggtaccatgatagctgctagcgtgcgactgaaggcagggtccctggcccctgctgaagcactactgctggccagcaggctcacgcaccttggcctgttgcttctaggggttgcctgtgctattcagccaatagtgctgctggcccagctgagcgccgcctagagagctcacttccctttcctgccacggagtctccctcttctgcttttcccagcaggaagggcccagcctcacctatgtaacctgcagccccccgccaaccagttaaggctcccctcttagacttagaagtctatggccaatggcatccggctacctgccctccctgccttccccagggttcctcagaggaccctgggctttctgatggcccagaggggcctctggcattcactccagccagccatcccttatagctccaccattttggttcaatcagtgttccttctctatcaggtctggtggctgttggatggggctctccaagcaagaggtggccctgggccagtgcgttggaagacatggggaccacagaagagggaagcccgagggagctggcattggtctgaactgtgggtggatgggtggattgcctgggttccatgagacaggccagcgtgtgtggggtagggagggccgccgcagtccccaggcactacctatgaagctccagcttctccctccatctccctcccctttcccttccagcccctcttttccaggaaccttgccacgcccacacctacgccctcccctccccggccctccacagctgctgcagcgcacccatactctgcacttgcctcaccagctctggcttttctctaacccgttttctctctgctttctctccaactgccagctgatcgggtcaggcaagtccatcccgtcctgagagccccaggccccacttcgacctctaaacacatccctcctcttctcagagacctccctttccaagcctgcctgggcgggtgtcctgtgacttgacagtggctcccccagccccaaagccagcccccttcttctgtgacttagtctgttgtagtggtgagctgacacgtccaggtgtgaccgttgctgaaaacttgtgccccctctgtggtatgcccctgccctgttctataaatagctataaattctctctctcacacacacacacacacacacacacacacacacatatatacatatatatacgtggccaactgcctcacctctagcactgggaatcagtcccgtgctgtgcttgtggaatcttgtagcccagcaagaggaagctgtctcctgacatcgcccctccaaagtgcaccacctccagtgagcttccgggacatgcgcggcctgtggacagccagcccccgccatccctcccgcccttctggccaagcatggcggtgctgtgcaggcagctgtgtggcctgacagtctctaccagtcctgctgtcccttggctgagaaacccatttctggatgacagagaatgtgtcctctgctggctgtgttctctatggagctcaggggatggaaaaggccaagccatttttagggtgctgttgggagcagtgaaaaggtcacacccttttcaagggacacttttcctggaaagtccctggagcttagctggctcttaccctgtgaagccagctctggccactaggggacagggccctgaactcagcctggagggaacctgcggggcagccggcactctggagggacagacaggccacccggtgcagacaggagagggaggcagggggacagaacggaagacacctggggtggatggaagtcagtgcccttgggcactggtatctgtcttccctgccacagctagatcaggcttctcaaccagttggctgtcagggccagagtgtactccgtaggcgccatggcagtccccatgaaatccaccaggtgtcaccaggcagcatacaggtaacaggcctggaaggtccccaacagcccagctggacatgctgagacactctggggctcctcattcagtgggacaaactgcaggacccagtgagggaaatgggaacataccaggccgagcagtatggctaaatccatttattccaaaatcaaaagcaaaaaacaaaaaacaaaaaacaggagtcccatcaccaggcagccatgaccccatccccgcctgcttcctcgctcctatgctagcaataaataagtttcccagccgcgaataattataagaacctcttcctcatatgccagctgcaacctccgctaggtacgatacagaatgttacacagctacagtatgtacacgggggaaggggggccacccccagcagcctgtgccctggcctggtctacagttaactccactgtcccgcctcagctgcctctctgagtaagaagatgggagcccccctgagggaaaagttgctttggtgagagtaagaaggccgtcagacctcctccaaacaaaccaactccaccaacctctggctcttaaataacaaacatcatcatccagaaatgtaaggactcagccttggtcaaggtggtaaagggtctgtttgtctccctccattagacaagggtcttgtcttgctaccctaatggtaaagggctgactggggaggggttgtagggacatggtgggggtgaagactccagacccacttctccaggcttatgctgacaggggcctgcttttatttatttttatttttatcccatgactttttttaaatcctgtaactaatttttcataactttttaaaataacttttcataaaactttttttttactttttttccacaacttttttttgccacttttccacagtatttttttatcctgtaactttttcatcccacaactttaattcctgttaacttttttagtttgtgttcttttaataaacacacttacatagttacaa

SEQ ID NO: 843 - DNA, 20 bp, Homo sapiens
gggccattaggaaacagcta

SEQ ID NO: 844 - DNA, 26 bp, Homo sapiens
agggtacatatctttttcccattctt

SEQ ID NO: 845 - DNA, 25 bp, Homo sapiens
tggaaaggcaaaggtcagtgcatga

SEQ ID NO: 846 - DNA, 19 bp, Homo sapiens
tgaggacgaagacgaccct

SEQ ID NO: 847 - DNA, 21 bp, Homo sapiens
ctcacaggcaattcgtttgtc

SEQ ID NO: 848 - DNA, 24 bp, Homo sapiens
caagcgcatctcgatctgctcctc

SEQ ID NO: 849 - DNA, 21 bp, Homo sapiens
ctttcctggcacaggagactt

SEQ ID NO: 850 - DNA, 25 bp, Homo sapiens
cacattggaaaattgacagcatagt

SEQ ID NO: 851 - DNA, 26 bp, Homo sapiens
agggatattggtgctggaaaaggcaa

SEQ ID NO: 852 - DNA, 22 bp, Homo sapiens
gctcctcactaatggcctcttc

SEQ ID NO: 853 - DNA, 24 bp, Homo sapiens
ggtggttatactgtccgaaatgtt

SEQ ID NO: 854 - DNA, 26 bp, Homo sapiens
agcagcgatgtctcatatgtccagca

SEQ ID NO: 855 - DNA, 20 bp, Homo sapiens
ttgagcgtgagcaagatcct

SEQ ID NO: 856 - DNA, 21 bp, Homo sapiens
gacgctagggtcgctgtagaa

SEQ ID NO: 857 - DNA, 21 bp, Homo sapiens
cgtggactgggacgtgcacca

SEQ ID NO: 858 - DNA, 44 bp, Homo sapiens
ggatacggagatccctaatgagctcccctacaatgactactttg

SEQ ID NO: 859 - DNA, 44 bp, Homo sapiens
caaagtagtcattgtaggggagctcattagggatctccgtatcc

SEQ ID NO: 860 - DNA, 21 bp, Homo sapiens
cttatgggactttcctacttg

SEQ ID NO: 861 - DNA, 21 bp, Homo sapiens
tcctcgcccttgctcaccatg

SEQ ID NO: 862 - DNA, 23 bp, Homo sapiens
ctcaccatggatgatgatatcgc

SEQ ID NO: 863 - DNA, 24 bp, Homo sapiens
attttctccatgtcgtcccagttg
